United States Patent Application Publication US 2026/0058010 A1 - sequence listing, part 57

SEQ ID NO: 650 - DNA, 274681 bp, Homo sapiens
  source 1..274681: mol_type = genomic DNA
tgggagagctgcatgggggcttcaaacattgtttctcacaatggaccatttaggagccctgactgccttgtcccatgccaccagaccatgacggaccccaggcagccccgagcggggtagctgcagggtctttacttggagctgaattcattctcacccagggacaaggagccaaagacagacacacctggaccaagtcctgactacatggcctcctgggccttcctttcctcatctgaaaggggagcagcattacagacctgccctactacctggggaactgagccgatgacacctccacagtgccccatgtagagaacactcgacacacctcaggaggcacatcctgccagtgccaccttcccacctgtcctgccttctgcttgggaaaataaagtgattgcagaagtctgctgtcactcactgaacaccccagagtgggctctgcagggctcagttccacggcccctctaggctggggaagggcagcggcctttgggctctgctagcagcagggaaggggtgctgcgcggcagccacaccgtgggggaaacaggttttcctctttgagagggtgaactcctggcaggaaggagctccaggcaaggatgaacagagcagcccctgctctgaaatcgcttgccaacaattggagacatcttggattaacaatcttgcctttgggtttaaaaatatctggggagggcggattcaagtaacttgtttccacagatgcttttgagtacctgttatgaaccaggtcaactgctcttatcagtttgggtcaggagtcagggacaggatgttggaaggaaggaggagaaagctgcaggagcttatttgggatgcacctctgcctcccagaaccctcccttgccacgcactacgagcattttctgagtcctacagtgcaccacaccaggcacagtactagcgcctcaaatactttcctgcacctcgcttggagcacgatgactgactcttcccaggttcctcagcatcctttaaagggatcctccaggaaagggccacattaaccccaaatccaaccacactctggagagcttggctttgccaggtcctgcctgcctgtcttcaataggccctggaccttggcatgcccaaggctgtttccaaaatgccaccttctgctgcctgtgaggcgtttcctccgagaggggggctacctggggatacagatggagacaaggaaagggtctcatggaagacagtgtgagctcccctgaccctggcaccaggtctgacatacactactcctcttgctctggttcttatccatgtctgatttccttccctcacccagggctcccagcacagtgctgggcatgcagggacccctggcagtgcttgttgtggacacgctggccacatgaccagcaccccacctatgcaggggtccactcagaccatctggtcagggaggctaaagatgggattcctgctttggggtcacagtcaaacaaaatcaaacaaaatgatctctgaggctcctgccagctctgaggctccaggagtcttagttacttcttaattaattttttcttaattaataacaaaccaaatattgcagcaacaggcaagctaatgaactaaatgaggttaatctgttcactacacccatgtagcacatgactgggatgggagattcgcagatgcctacttgatatttccacttccttctctcggaacgggcggcaggaaataaacacgatgttctcaggcttttcccggtgggcgcgtggaggccccggcagcagatcctaacactcggcttcctctccacagctccgggccttgggatcgattgtgtcctgtgccccaaatacaacagatttgccccagttggtgcttcctgtgagcccagaatagaaggtgccatctgtcacgttttagatgtcatatgtccgatgactgatgactcagaaacagggtgtatcaccaggaggtgtgaggaggaaggcaggtgagaaccagccagcctggtgaagcacagctcagccgcacacagagacagttcgtggggacctcagctgggcccctcggcagcctgcctgccattcctctgcaggcagaatgcctggggcgctccagccctgaaagctgctctcgtcttccgttttccaggaggacagagtggccctcaggacagggtatgtctgggatgggagagcttattggcacagctggtgcggggtggggggttgtcccctgctggctgggccgagggggagggctcctggggagggccacggtgtgggggccggccccccgacgggacgccccggccacacaccaggcgtttttcatccagcagggacaggtggtactcgcaaaggtcaatcagtgaggccacctgctcatgaagtggcagcatcttgaacttcctctgagccaggaaaaagaaagcttctacgaaggcctgcagacacatccctgtgaacaaagagactggatgagggggtgcacacagctgccctacgctgccctgggaaggcccacctccagccacaaggatgtcagcaagagctagccccgctccccaccaccgtctccattccagaaactcctaacagggctaactcactcacagagtgcccactgtgcccaccaggcactagctgggcattttatggccatgtgcagaccaaatctctcacacagacctatgaaggaagttcggttaaccctattttgcagatgaggaagttgagtctcagagacacggagagagctggggaaagttatataagatttaaacctagctcaaagccttgtaaaatgtccacaatgaaatgcccccattaaaacccagctcctggctgggcgcagtggctcatgcctataatcccagcactttgggaggccgaggtgcgtggatcacttgaggtcagtagttcgagaccagcctggccaacatggagaaacctcatctctactaaaagtacaaaaattaactgggcgtggtggcatatgcctgtaatcccagctactcaggaggctaaggcaggagaattatttgaacctgggaggcagaggttgcagtgagctgagatcgtgtcactgtactccagcctgggtgacagagtaagactccatctcagaaaacaaaaacaaaaaaacccagcttcttaacttttataatcagggaacaaggttatgaagatatgaagataaacccggtttgacggcaaagttctatctgataacagagatgctggttacatgggtgtgtgcgtttgtcaaaactcaagttgtgccttaaggctcatgcattttgctgtctgtaaattttaccccccaaagtaaaataaacccaactgtcatttctctggcccaaaccatattctggaaagaataaatagtcatccctacgacacccctggaatgctcttccctggttttgtcttataagcgtctacttatctttgggacctgagctcaaaatcactgactcagtaaaaccttccctgatccccagattagacccggccccggtacaggattcctgcacttctctttgcagcaccggctgcgacttgctctgtgtctatctgtctgtgtggtctccatcctcctctctggactgtgcgcttcccgtgctgcccagaggtgctcagtatagatgaatgagtgaatgaatgaatgggtgcattgacgctaggtactttaccaacagtgccactaattctcacaatacctttatgaggtaaatattattatgccccatcttacagattaagaaactgatggcagggtgcggtggctcacacctgtaatcctagcactttgggaggccgaggtgggcggatcacgaggtcaggagatggagaccatcctggccaatgtggtgaaaccttgtctctactaaaaataccaaaactagctgggtgtggtggtgcatgcctgtaatcctagctactcaggaggctgaggcagggggaaacgcttgaaccaggaagtcagaggttgcagtgagccaagatcacgccactgcactccagcctggcgacagacagagcgagactccatctcaaaaaaaaaaaaaaaagaaaagaaaaaaagaaactgatagagaggttaagtaacctccctaaggccacacagccagggaagagtggcctggaaattcaaactgactcccatgttttttaactaagttgttaaaaacttagttaaaagtttcaactgcctgaaagggtctgagtcttcccaatgtccaagtaaaactggaacccggggatctaaacctataggagtccctgggctcttcgggaaaggtgacagtaaggttggactgaacaccacgtggcattttagattaggctggtgtcaactctgaaatccacaccttcctggtgactgtgcattatttacctgcttctggcactgggggcagcagcctggcctagggtttgtagattacaggttacatacagaccctgggatcccagagctatttttgccttgggaacttgagctgggcaaagaagttgtgttttgcctcccttatagtccatcagagctcttggccttgggttcttttgactgcagacatcctacaagggcgctgctctgtttgatcctgatatgaggagttgataaaatgggttttacaccagggttacttttaatgtaaacagcggcctgggatggtcaaagacacaggggagtaggagccttggtctgactcaagagacagatgtttcctaatcaccagctctgggccaggcctctcatagggtgggcgtgtgcccgtgcaagtatgtgcatctgtgtgtgtgtgtgagatggtcgggtgggagggtcagatacacacagagtgagaagattaggatctaaggcccgaggaacccagtcccagtcccctacttcccaacggtgtgatctaaacagcgccactcaaagtgtggctggctgacagtgccaagcccatgaactgtgtgtccctggtccctgacaagataaggcgcttgggccagaatgttaatcatggtcctcatcaatcacattgtttagtgctgttgacagtatttagtataatagcacgtcttcctctataaaggaagcagcgtgctgtctacattctggctcaggcgtcttgtccaggactgtgacaatctgtgggttgcaactttgagtaactctgctctgcaaagcccttcccagctgtaatgcacactccaatcaccagcttgttcaaatgcgaatcctggggtggggcccaaggcactgaatttctagcaagcttcctggtggtgctgatgccacactttgaatggcaaggatctagccactcactgcacctctttactcaacaaatgtcagtttcgttcccttagttgatggtagaatgtgattagagctatatgcatagaaaacatacaatgagggccaatttggaaaaaaaaaaaaagcacagcaacatcatctagaagacattctaaaacgagaagtgggatctcactgtgctgccttggctttctttctgcttgtctgcattttgtgattttctacagtaaacatggatgcaatttaaacatctgcagtgggaaattctggtgtgtggaaagagatgatggagggggagatgcttttaattatgaaccccttactactatttgaattggaagtcaggcacatgtattactttgaaaaaaaatacaatgcaaactttttgcacatatattctactttttatcaaagtagaatatatatatatatatatataaccagtaacctatatatatatatatatatatatatatatatatgcacacatatatatatacacgcacatatatatgggttatatatatgggtaaaacccatatatatatgagtgtgtgggtgtatatatatatatgggtttatatatatatatgggtttatatatatgggttatatatatggtaaaacccatatatatatgagtgtgtgggtgtatatatatatgggtttatatatatgggttatatatatgggttttacatatatatgggtaaaaccatatatatatgtgtgtatatatatatatgtatatatatatatgtgtgtgtatatatatatatgtatatatatatatgtgtgtgtgtatatatatatatgtgtgtgtatatatatatatatatatatatatgtatatggttttataccagggttacttttggcagggctgggatttgaacccaatcctcatgcactgctgcttctgcaccttattcccagaaaccctctggagcatccgtgccaagggtgcctgaggatggaaacggtagaacctgcaggaaacactgaacccagcaccttgaaggatctaggggttgggggcatcggtggaggcttttggcaaagtgggcatgacagtggggccttgcagaatgaggagggcttggatgggcagagatgtgctgggggtggtcgactgggctgagagcagggacctgtggggcagggaggcagggtggatggcccaggggcctgccacaggacaggctggggaagaggccaaagggactaaacccagagagcaccggtggtcactgtggggctggggtcaatgtcagatgaagccattgggagcccctgcaggtgctgggcaaggcccgcgtgatccgagtcccatgggtttggacccataacagtctgatcacattttctagtctgatgatttctaaccatttttttttatagtgatagaaactgtgagggttttctttttcttctcttgttttatttcttaagtgaaatcttccgagggagtccagtatgccagacaggtaaagggacccttctcccctctctgtttaggtcaggtgaatggtggcttacaggcctgccacacagcccctcacccctcggggcccttggatcttcacaagcagcacaatcaccgtcaccctgaggcccttgaacccttgtttagcatttgcattttgccgaagggtggggacgggaagtacctgaggcccccaagtcacactcagcaactgacaggaacagggctcgaccccagctctgggactggagcccagggtaccctcaaaccacatctccccctccaaaaagaaactgaacgcaaaatcaaaccaatcacttctctggccatgggctgtctccactgacagacggtcctattgaatgcgtgccagtgagtgtggggggacgcggggatgccccaaactgcacgccatgagcatatgggcctctggtcccacaatggcccattctaatagccctttgagtttgactagatattggctttaatcctcaattcatcaaggtggcgcaggaaacggtggtcagacccaggccaatattcactgagcttcagagaacgtaaccttttgaaggtttcaagggggtggggattgggcggggaggaggagtcagcgcactcagatgattcaagttacgctgcaggagcagggctgctggggttccccctgagagtcaagctcaggctctggactgtcccctctggctgcagtttccagccttttccagagcctccacaatggttgacgttctgccaggcagaactggggctttcgccttccttattttttatttattataacaacatataatgagagtcttagcagaaagtgccatagagcccatgcatggccttccctccagcacttacatgttcttgcggaatgaccttccacccttactctttgtccacaggaagatgtattgtcacttagtgataacacacattgaactttttttttttttttttgagatggagtttcgctctgtttcccaggctagaggacagtggtgagatctcggctcattgcaacctccacctcccaggttcaagcgattctcctgcctcagcctcctgagtagctgggattacaggcatgcaccactatacctggctaattttttgtatttttagtagagatgggggtttcgccttcttggccaggctggtcttaaactcctgacctcaactgatccgcccaccttggcctcccaaagtgctggtattacaggcatgagccaccatggctggccacacggaacttcattttgcttaaaattatatcattaacatttttgtatgttgctatgcagcctttataaccattattttaatggttgcataactgtccatcaaatttttgccttctatgccatttcaccaccccgtccctgttgaacacaaagactatttacatttgctcactattgttgagaatattataatcaacacttggtatttcattgtttttatttatgattcatttattcccttacaataaaacccttgggacctgggtggttgtttttgtttttaataaatgtaaggttagtttagtaattgacttcatgttaaaaatacctaaaaccttacagaggctgggtgagatggcttaaccctgtaatcccagcacattgggaggctgaggcaggaggatcgcttgagcccaggaatttgaggctgaagtgagctatgatcacaccacagcactcccgcctgggcaacagacaagaccctgtattttttttttttttgaaacggagtctcgctctgtcacccaggctggagtgcagtggcatgatcttggctcaacctctgcctcttgggttcaagcaattctcctgactcagcctccctagtagctgggattacaggtgcccatcaccatgcccagctaatttttttgtattttagtagagatggggtttcaccaccttggccaggctggtctcaaactcctgacctaaagcaatccacccacctcagcctcccaaagtgctgggattacaagcgtgagccaccgtgcccagccaagaccctgtcttcaaaaaaatttttaaaaagaaaatctcatagagtacccaaatggacaaagcacatgaatgggcaattcacatatatcggcaaataaaagagaagacatccggccccatccaagccacaggggctattgctcaccaagtaaactaacaaaagtattaaatactgataatgagaggtagtggtgaaatggctatagacttttgaaaagcaatttggcgaaagttttaagagccattcaaaggtttattagggaggtaaggaggaaaaaacaaaaaataaatgtgtttatatcattgaacacagtgatcacaatcctaggaattttccctaagaaaatattccttccaaaggaaaacaatgtatacaatggtattcattgcaaacttatttatagtaccacggggcatgggggaaggcagtgctagacttatagggtattttaatatcttcattcttttctgaattttccaaataagataatgcatgctcgttgttgataataattcaagtacacacacacacacacacacacacacacacacacacacaccacacacacacacaattttaaaaatacccccaacctagcctctgaggtcactggttctgggaatctgtccttgaccatccccaggtggagttaatcacccttcatggtgcttcttcttgtttcttatcatatactaggataaatccatgggtacatggctgtctctctaatgagactctgctcctacaggtggggaccatgtccctgtcttctctacattcccagagcccagcatagcctggcacacagtgagcaccaataaagatgcatttaatccactgaatagaatgtgaaccttgtaacagtcgtgtgatgcaggtgttattatgcccactttgtagctgaggacactgaggtaagccaaggggcaaagagaaaagagacccatggaaacccttctcttagaagatttgcagacttatgaaaccgcaatgatccagaccagaggctctcgaactttcgaaactcccagagggcttgttaaaatacagatggagggtccagccccacagtttctgattcagagggctgaggtggggctgggagtttgcatctctcacaagatcccaggtgatgctgaatcccgctccttcccctccctgctccccactgcacagtccagtctgtataaacttcacttggaatgcccatctgcaaagcggggcttatttgcaaaaggacctgcccccaaactgagagaagcttgactttgggctaaaaatgtctacattttaaagacactctgattgagagcaaacccaaccagttatttttaaaagactaatgatggagctgaaaagccatggaatggttccaactgcacattaagtcctttctgagaaaccgcacagccccagattcttccagcatcactgcttgcccactaagtaggagagaacattctccatgccatctcctaggccctgcccttccctgtctgggctatgatagaggagacctggaaggttccagaaggccaggccacagggggctctgtagaccatggcaggactttggatttcaaaataaagaagatgggaggtcactggggagtcctgaagtgacatgtcactgtggaagctatgttgaaacccagtggtaggggcacatgtgagaacaaagagatccattcaggggttactgcaccagtccaagtgagagctgacatggtggcttggaccagtatgatactggtggaggtggtgagggatgattagatactggatatggtccgagggtagtgccagtggcatctgaggtttgcccatggttggatgtgggtgtgaaggcaagccagcaatcttatgcaggagggcctctgacacctcaggccgaggaaactggccttcccctcaaggtcaatggttttcaaacattttacacataaaataatctggggaccttgccagaaatgcaggttcctgttccctcaccctggggattctgtctgttggcgatgaggccccagaaactgcatttgtaacagcagcgttggggcttctgccccagtgagtgatcaggaaatggaatgaacatgccaacttggccatctcttgaagggctctatcggagtcagtggagtgaagaagttaagagaatggtctggctgggcccagtggctcacacctgtaatcccagcactttgggaggccgaggtgggtggatcatgaggtcaggcattcgagaccagcctggccaacatagtgaaaccccgtctctactaaatatacaaaaaattagccagacatggtggcaggtgcctgtaatgccagctacctgggaggctgagccaggagaatcacttgaacctgggaggtggaggttgcagtgagccgagattgtgccactttactccagcctgggcaagagagagagactctgtctcaaaaaaaaaaaaaaaagaatggtttttgagaaacctggtactgggctggctctgctgtgggtgatcaagagcctttggggacacagaacaagctttatcctctgaaatcccactgttcactctctgctcctggtcttagtcttctcgggctgcaaaataccatagcctgggtggcttaaacaacagaaatttactttcacagtcctggaggctgaaagtctgagattggggtgccagcacggtcatgttctggtaagggctctcttcctggtttgcagacggccgccttcttgccatgtcctcacatggcagagaggcagattgggctctctggtgtctcttcttatcaggatgctaatcctattcaataagggacccacccttatgacctcatttaaccttaattattccttagaggctccatctccaaatacagccacatggaggatagttaggatttcaacatataaatttggtgggagacacaatttggttcatagcaccctcaaaccctcagttctgctgaggtgcacctagctcttggggacactctcctactactactcaagtctctgaatttacctgagccatttagaaaaaaatataagcaatcctacacttcttccctgccccttcgccagcactcagaaaacccctcacagcttggattgggagttgaaaggatctctttggtaacattgccttaaaagtaaaagtaatgaaagtaaacagtaatcattcatatttatttagccctcattatgtagaaggccctggattgtggggtgccttcacattatttaatttaatcagacaaaaaccttaggaagcgggtattgacaatccattttacattcaagaaacttgccacaatcgcatggctggtaggtggcagaccccaaccaccatgctcttaagtcccttactccactgctgcttcgagagttttcgaagatttggccaggtgcagtggctcatgcctgtaatcccagcactttgagaggccaaagtgggtggatcacctgaagtcaggagttcgagaccagcctgaccaacacggtgaaaccctgtctctactaaaaatacaaaaattaactaggcatggtggcacgcacctgaagtcccagctactcaggaagcttagtcaggagaatcactttaacccaggaggcggatgtttcagtgagctgagattgcatcagtgcactccagcctgggcaacagagtgagattccatctcaaacaaaacaaaaaacagacaaacaaacaaaaactgggggggagttttcaaagatttgaccaagtgttaattacagtcatttagaacaaaacaataccggccttgcagcgaatgagggatggagcctcatctatctctgctggatgtcaacaagaaggtgcagttagattcgctggtctttgcaaacaggctttccctacctgccctgtatgccacaagataagctgttgagtatttttctaaacttcatttgggttgacagatgttgctagagaaggcagccttcgaaacattccagttgcagccagccgcacgtctctcacctgagaccgcctcttggatattaagaggcggcccctgacaaacgatggcctcattctgtcaataggctgggtgaggatggcccaccagctccttctaggccaaagccccctgctctccactcccgggaaggcatcgttgcactcagggctttatgaaaacactgggagctgctcaccaataatctcatcatctcttcaccagcttaaggatgggaacaagaatcctatcttacgtctgcatagcactttccagtttacaaagaacatccatttttctcatctacttctcagggtaatggtgggaagaggacatgtttacgcgtattcttcatttacagttgaggaacacaggcccagagaggctaagtggcttgtcaaggtcatcgtctaggtgggcgaggcagcatttacatgcgtagctgactttcaagcccacactcttttttctacattacgctttcttaacatctgacatttatgtattattttacagtttacagagcacatttgaatatatgatataattaaatccaaatcattgtcgacagccagggatattattccagactgaatatgagatattttcttcctcttaaaaatacctgagcttccttgctagtaattctgtttcctgggattggggtgcttaaacagaaacttgccaagcccttctctctccccagtctttaaatctccttcttattactcacctagaagagatgtttctgtcttatcgtacaattctaaatgtataagtatacaagtttgctgtttggaatcattggtaggaaataaagctgaatgatcttgactagaattagcttagtgcttcctatctgtgtagtgaaatggcccccagaagagctatctgtgaaggctgcacaaactccaaggcggttcatcacaggaatctcagccttctctccattcttagggcatcttgcagcccagctccctgtctgctgctgcacggttcccctagacttgaccacaatctctctaggcctggggctggggtctcgaaggactctacacatggtagatcaaacctgggcatctcccagggagaaggcattcagctccatgaatagggacagggactcagatgagctggtccgggtcccagctctcccacttactgcctgtcaaggcattttacttttctgggtctcagtatctgcatctgtaaagtggggatagtaatagctgccctgagtggcttttttttttttcacaaggtaccacacagaaaaagcaacacagtgcttaaaaaatggcagcacaggccaggcgcggtggctcacgcctgtaatcccagcactttgggaggccaaagcaggtagatcacaaggtcagaagttcgagaccagtctggccaacatggtgaaactccgtctctactaaaaatacaaaaattagccgggcatggtggcacacacctgtaatcctagctactcaggaggctgaggcaggagaattgcttgaacccaggatagggaggttgcagtgagttgagattgtgccactgcactccagcctgggcgacagagtgagactctgtctcaggaaaaaaaaaaaaaaatagtggcacaagtgcttcccatcatcttcccacttggaagtctgctctctcacctcactggcctggagcgctatcacaatagtggtttcattttctcctactgaagttggccaatttcttttcaccctgctggactgagtttcatgaggccaggaatctgagttaaggggcctgggatctccatggtctctacccctgtgcactgtgtggctttgaactggtcactttccctcagagggcctcacttgcttcccctctgtaaagtgaggggctggacggagtgatctccgaggattccacaagtattggaagtgatgtagacttctgaatattttaagaagtggaatgtccatgtttactgaggacattctgcccaccaggattcccactcggcattaccatgtcctactgccaccctaagagactgggctgccaatactcacattgttagagaaagtgctgagctcagggagacccaagcacctgcccaaggtcacactccacctgcccaaggtcacactactggagagtggtaagtggtggtgctgctccctaccagttctcccccaacccagatggaaatctcaaggaaaaaagccttgcttctgccaccacccaccccaccagctcaggaacagaagttgcacatgtgcagtcattgtattaagcattacggcaacaagaagtcactatcacctttgtccttggccggatggagaaattaattaagtgtcacgactggaccataaatagaacttgcagaaaaatcattacccccagaagccagcagcaccaaaataacaaacataatcaaaggtgaaagcaactcttctatcatttcattaatcacaggtcatactgctggccacagcagagtggcccagaggtctcagtccagtcccatccaacgtcacccctgattccatcatgacacgaacacaagttcctgagtcaccatctgggaagacagggccacagttctagtcactgcttcctgcaactgcttcatgctgttgtggacatttctcgagagattaatggctcctatagaacctttggaggctcaggactcattcctcagcaagtggtcaaaatctctggcttaaaaaggacttcagagataacacaatctaggcccttgcagggtaacaacaacacccagaatgacaagagggattactaagagtggtctgtatacaacacgtgcttaatatgtgtcaggcactgtggtgagtactttatgggcaccttttgtttaatcctcagaacaaaatctggatggtagatgcttttatggcccctgattgtctgtggttgtttgcctttgtttagtgatatggcaaagctttgcatttgtcttgggctctgtgtgttagttgggtgtgggcagacctagccattcactcagagtcctccaggctggggctggtagtggggataaaaaaccagggcagataaagcatgatttctggtcctgtcgctgtggctttctgtagttgccctgtgagattctgaagggcatgggttgcccttcctgacattgctaacaacagccatccagccccccaacttggttgcttccagtgatggggagctcaccactgccccaggaggtcccttctcactgccatgtgctctctgctctctgcctgggagctgaaatgtgcaaaacctcccccgacaccccagtttaacacagagtaaatcaacctcttcttccatcaccacagcctttctctacgaggatctgaggattcagaaggcagtaaccatgaccactcagttctgccagccctggctgactcctcaatgtgcagattcacagatgggcaagcctcctctgatgcagggcagggagaagcagggagagggtaggatgacccaacgtgagatgggggtgttagaacacaaaggaagaagcaagtcattgcctggaagaggcaggataggttacagggtgcctgtggtgcacatggtgagaaaattcagacagaggcaatgcacaggtagtggaaagtgaaggtcctgtttccctcctctgccttgcgacctccaattcctgtgagctggaagtgaatgctgtttgcaatttctggcatatacgcataaaaatgaaatatgtgcactgctgtgtgcatcaatatctgtatccatataattttgcacacaaataggatcaccttatagctaccgtactgcacttacacaattttaaccatgccttgacgcttctccgtgtcagcatatatagatctaccctgttgtttatagactgtatagaattccatagtatagatgtaccatgagtttctaaaatccttcccctactaatggacacttaggatgcttttctcctgttttcttctttttttgatattgtgaataatggtgcaatgaacatctttgtgtatatatcagtacatacttgaatgagcaatcatctctttccagtggaacttatgggtcaagtattatttttactagtatgttttgatagctcttgccaaattaacttggggttgggatcttcaaggatcagcactgaggaggaagatctttctgaggagaggaactagtagtacaaaatcttggtgctttgaaagggctttttcagggtgttagggaacagagctggtgctgtgggcggtctggcaggtgggcctggagcgggtgggggtgagggatgaggggaggaaagggagtttgtctacagtcggtcctgattaatgctcccagcttgtcagtttctcccctgctcctgaatgccaccatctgccatcaaccagccctgggatcttgtgtggttgaaaagcctgccttcctgtcactatcctctctctctctgttcccttctcagccagactgcccttccctcctggggtggcactgcctccacagcctcccttccagctcaagagaggatgtccactccctgtctctcctcccaaagggctcacgccaaacgcctgggtaccttccactcccatgtcagctctgagctcctcttggctctctccccacagcatgtgaccacgtggaagcctccctcctggagacacggtcttcccacgtctgtttcatctcgctctcctgcttcttgctctctctctcttgctggcttctgtctgcttttccttgctgtgggccccacagggctctctctctcgctctctcttcctgtcattcattccccaggttgaaataccttcaatgaatccatgccctccaaatcattgtctccaggccagcctgcttttttgccactgggatatcgcattagcctgttaaaaatgaatctcttggtcttcccttcccaattctgtttttccttgagtctcgcccattttaataaatggtctctccacccacctagttgttcaagccagaagcctgaggtcatttttgagacttctcttacctcctctcaacacctccacatccctaggaccataaacctctgctctcctgccctcccccacctgagcagctgtcgtcccttgaagcccccacagcctcctcgctggtctccctgtttccactattgcccctttcaatacagcatccagaatgaccttttagaaacacaaatcagggctgggcatagtggctcatgcctgtaatcccagcactttgggaggccgaggtgggcggatcacctgaggtcagaagctcaagaccagcctggccaacatggtgaaaccctgtctctaccaaaaatacaaaaattagcagggcgttgtggcatgtgcctgtagtcccagctactcaggaggctgaagcacaagaatcgcttgaacccaggaggcggaggttgcagtgagctgagattgtgccactgcactccagactgggtgacagagtaagattctgtcaagaaagaaagaaaagaaagaaagaaagagagaaagaaagagagaaagcaagcaagcaagcaagaaagcaagcaagcaagcaagcaagcaagcaagcaagcaagcaagcaaagatagatcaaaccacgcactcccccactttaaactcttcaacaacaacatttcttgccctgcccacctttcttgccctgctctgagggatcgagccccgcctctccagctgccgctgtaacccacgcccctgctcccgtcaccctgcgggccttcatttcgcagaacctgctccccgcattcccaccttggggccggtccctggcctctgctcagaacaccctgagtcccacctggcgaagcttccatctcagcattaccttcactgacacatctctttgatccacctcttaatataaatgaggtcctctctgtcctcctcattaaaacttatttcacagaacgcatcacaacgtctaattacatgcaatttctgcgtttccatgtttaatgtctgcctcggccaccggatgtcagcagtgctagggcttgggtgttctgttcatccctgcacgtccccatcacccccagtgcctggcgtgtaggggcggctcattgaacattaggtgatccacttagggtagaaaaaatccaggcttgatatcagacatgcctaagttcaaatccagggttggcctcttacacattgcggggtgatcttcgcttactcactgcccagctgggagcctcagtttctttctaccctgcccggctctggggggctcagtgatagaaaacagacataaggggctgggcctgtgtctggcacatggaagacacactggaaacatggccttctttcttgattgtctttaagtcatgagaggggccaagcctggcagaataaagagtattctcatggagggctgcggctcagaattcccattctatccaaagatgggcaaattggaagacgggcaaattggccctaactcagccaccaacagcaaccctcttccccatccccccgactgtccagcagttaactggcggggccttctagaatctccagaagacctcagcctcagccttctcagccttgggcagggcagagcagtgcccactcaccaagtggactgagccctatcctcaaggtgagacccctctgaggagctcttcaaagctggcctgccatttggagcggtgacaggaggcagatcagtgtcaaaaataagacagagcagtgggtttcaacttgactcacattaagaatgtcacgttagagcacaaatgagagagaagagaaatgctcttttatgcgggagtttatttttgtcactttgtcagagagaaactgcagcctggagggcactggagctgcatcgaatcacccaaaacattaacatgcaaattgccttctttacagaaggtaattttattagtgcacgaaaatgtttctttcactgtattcatgcctaggagcagtgctatctgggggccagttagggcaaccgcaagagaagaattagggacagtcctgaactcggttaagatctattacctccccaacttgggaccaccacgtatcctcggatgcatggaacacagtgcgctgcgatgtgacagctggctaccgatggatgcacaggctggagggggcaagtgacttgttcaagatcatacagcttcttttttcttttctgagacagggtctcgctttgtcactcaggctggagggagtatagtggcttgatgttggctcactgcaacctctacctaccaggttcaagcgattctcctgcctcagccttccaggtagctgggattatatgcaattgccaccatgcttggctactttttgtatttttagtagagatggggtttcaccatgttgcccaggttggtcttgaactcctgaccttaagtgatctgcctgcctcagcctcccaaagtgctgggattacaggcatgagccaccatgcccagctgatcatacagtttcaatgaggaggcagagttgaggccacgtggcctgtgtccagacaccaggtgaccaatagggaaccatgaggtcctggaagttgtcactctgagagtaaggagcctagtgagaccccatctacctatttgttcactcacttgcttgattattcaataagctttccctgtgctaggccctgggccccaaacatgaatcaggcactggcacgaggcacttggcctccactgggagcaggtggaaaggggataagacacctacaaatacttctgatccagcgagctatgacggctggggaggtgtgcctggaatcaacagagcaaggagagagcatggctgtttggcagggagggcagggagaagggtctggaagcttcacagacaaccgtctcacccatgggccttgtgcaggcaatcaaggcagggagggatgttacaggaaggagacaccatgagcagaggccccacgatggaagcacgttggctggccccaagcagcacaggacgtgtgggcgaagagtgtggcgggaatgggggctgtggttgtggaggatggagatgaggctggcaagtctaatctcaaaggctaaagagctcagatgtacctgtatcctgcaggtagcaggcaaaccctccagcgcccattcagaacagaaccgtgctccccatgagattttggaagggaggggcttctccaggccctgtgttgccaaaatgacagaaggttctctgaggctgcgcttatgtaaggcttcctcctcccttcgcagatgtgatcagtggggaagtgtgggcagagactcccacctgctaccaagaagaacgcactcagtcatgtaaggtctcgtggaacagacgaggtgagctccctttctctagaggctgcttggggcctcccgggctgaggacacatctttgccctgagtcacgtggcagctgcatggtgtggctgtggtggggcacgaagaactgttacagcagcccaggaagctgaaggggaaaagcccaatgattattatcgttgggccagaccattgtttgttgtgggggtctgtcttgtgcatttcaggttgtctagcagcagccgtcggcttgacccactagatgccagtatagcaactcccttcccccagtatgacaactaaaaatgtctcaaatcgtggccagatgtccccctgggagttaaaattgtccccagttgagaaccactcgtctctctagacttcagggaagacatggatgcctgaccactggaagtgtcccaattcttccagcgagatgcagagctccccgagagcatgtgcctgccttcttccacctctcagggggcaaaggacagggtatatttcatcacatatttgtggactatctcaaaaaggaatgtgtctaacttactgcttaaaacatctggaaaaagagcaggctggggatgtagaaagtcaatggacagtcggtgcttcttccaatactttgctagggtctcagagtccctcacatgtaaaacaagggggttgaaagagatgatctttagggctccctctccttttttttaaaaaaaaaagacacgtggtctctctctgtcacccaggctggaggactggagtgcagtgatgtaatcatagctcaccgcagcttcaagttcctgggctcaagcaatcctcctgccccagcattctaagtaaccaggattataggtgcatgccaccctgcctggctaatgtttttgtaactttgtgtatgtgtgtgtagagtcagggtctcgctatgtttcccaggctggtcacaaactcctgggctcaagtgatcctcctgccttggcctcccaaagtacaggcatgagctactgtgtgcctggcccccttctacttttgaacactatgattccatgtcagtaagatgaataaggtgaatatgtaggaaatgttacccatgaattctgaaggtggctcctatgggccagatgagtctctgtcttgggtaacctgggcattttttgatgacaaataactgatcagatggtttgtgagattctctctgctctcttgggttaaatgagtaagcccagatttccccggagaatctctgaaaggtaaacacttctggaatgttggtcattgctgcagtttctcaaagaccattagaatctaaagacaaagaattatggctctaccactcacgagctgggtgaccttggacacattatttaacctctctgagccttagctttcttctctgtaacctggagtacagagcttaaatctcaggattgttgggagatgtgcgaaatgctaacagaggacttttagtttcagctctgacgcataaagagcttagaagtcattgctcctggctgggcacagtgacatatacctgtaatcccagcactatgggggccgaggctggaggatcccttgagcgcagtagttcaagaccagcctcagcaacatagtgagacccccatctttatttaaaaaaaaaaatgagagaagtagtcactcccatctttacaacaataaaaaaaagctgaacaaattgaaaaatcaatgacttttctaagatccatgagtactgaggtcacaggacaagccaccaccctaaaaaccattgagacctgtgaatatagagaatcacagctgagttcagcttaccaggagcagaagcttctggagccaggagctgataagaacatttcactcgtaattgatgagttgctagagacagtgtgaggctcaacctttaactaggttgagttaaaaacgcctgggggccagtcttagggggtctcccacctttttgtgagtggggctccaggagccccaccaggttctcaagaaaaagattagagaaaatcttctcatgcttcagaaaggggtgggggaggtaaccattttggaatatgcctagagcactctccataacaaaggcctgctaatgcgggaaactattatttatttacttattttttgttattattattattattagagacagggtcttgccctgtcacccaggttggagtgcagtggtgcaaccacagctcactgcagccttgacctcctgggctcaagccatcctcctacctcagcctcccaagtagctgggactacaggcgtgtgacatcacacctggctatttttaaaattttttgtagagacaggtgtctcactgtgcggcgtaagctgatctcgaactcctaaactcacatgatcttcctgcctcagccttccaaagtgctgggattacttggtgtaagccatcacacccagccagaaactactttagtagaggctgatctgacctaggggaagggcaattaggtaactctagcttttctagcctttctagttttcacacataaagggagaaaaaaggggctaagaagcacttctgaaagtcacagcccatggactcaagcccactaggaacagatttaatctcaagattgtaaaatgtttctctacccagcaccttatcaccacatcagcagggttcactccagtgcaataacagtggattccaattgagagagatccaagaaaaagattccatttaaggagtttttaaggaaatacgaaggcaatagggagagaaaaaaaaacaaaacaaaaaaaacaattggaggaaaccgaagcttctggcacctatgactacagcaaacattaaacacagcccagctcctagaaagataaatataaaacctcacactgaaagcctgattaccttggttcctattatcaggtacttcatggctggctttcaacaaaacattacaagacctgctaaaaggcaggaaaatatacagtgcaaagagacaaagcaagcatgagaaacaaactcaagtatgacacagatgttggaattatccaatggagaatacaaaataatgattaatatgttaaagtctctaatggaaaaagtaggcaacattcaagaacagatggaaaatgtaaggagaaatggaaactctaagaatccaaaagaaatgctagaaataaaaaacattataacagaaatgaagaaggctctcaatgggcccatcagcagattggatacagtcaaagaaagaatcagtgagcttgaagatatgtcaataggaatgtcctaaactgaaacaatgaattaaagaaaaaaaatactgaaaaaaaggagactatccaggaacagtgggacaatgacaaaaagtacaaaatatatgttatgagaatatcggaaggagaagaatgaagggagcagaagatagatttgaagccgtaatatttgagaattttccaaaattacagacagacaccaaaaccacagatctagaaagctcacagaaaaccgtgcaggacaaataacaaaaatctacacctagagaaaatcatatttaaactgtagaaaaccagagacaaagagaaaatcttgaaagaagccagagaggaaaaataataccttacctatacaggtaaggtatatatgccttaggtaaggtatatataatgccttaaggacaagaattacaccagccatctcacctaaaaccatgcaagcaagaagagagtggagtgaaatacttaaagtattagaaaaagaaaccccaccaacctagaattctgtatggagtgaaattatcctccagaaatgaaggagaaatacactctcagacaaacaaaaactgaagggatctgttgccaatagacttgctttgtaacaaatatttaaaaacaaatttcagagaacagaaaaatgatatgggccagagactcagatctacataaagaaaggaagagcattagagaataaataatagaagatacaataaaatgttttttcttaattttaattgatctaatagataattgttcaaagtaataatagcaacactgcattgggtgattatagcttggggataagtgaaatgaataacagcaatgttataaggcatggaaaagagaaatcagaagttctctgttataaagtacctgcactatctgttaaaggggtatagtgttatttgaaaatggacttattagctggaaactaattgtaaactctaggataatgactatttttaaaaaggagtataattgctaagctaaaagaggagataaagtggaattatacaaaattctctattaaaaccagaaaaggcagaaaagagaagtaaaaacagaaacaaagaacaagtcagtgaatagcaagctgttacaaacattgataggtatcaatccaactatatcaataagtattttaaatgtgaatggtttaaataaattaaaggacagagactgttgagaggattaaaaaacgagacccaactgaaacacagcttaaagataaaaagaaacacactttaaatgtaaaaacaacaaaaaaaagatagataaaaaagcaaagggttggaggaagatatatcatgataaccctaactaaaagaaagttacagtagctatattaatttcagacaaagcagactgcagaacagggaaaattatcagggataaaggtgagtaataatgataaagggacaattctccaaggagacataataatccttaacatgtatgcacctaacaatggagtgtcaaaatatgtgagacaaaactgatagaactacaaagaaaaatagataaatctactattataggtggagacttcaacacccctctatcagtaactgacagatccagcaggcagaaaattggtaagggtatagttgaacatagcagcaccatcaatcaactatgtctaattgacatgtatacaatactttatccaacaagagtagaatatacattcttcccagttcaaatgaaatattcaccaagacagactacattctagaccacaaaacacacctttttaacacatttaaaagaatagagatcatacaaaaaattctctcaggccacaatagaattaaactaaaaatcaataacagaaagacggttgagaagtccccagatatttggagaataagtagcacatgtctaaacaacatataggtccaaaaaaatctcaaaagatatttaaaaatattttaaactaggcgaagattaaaatataaattattgaaatttgtgggatccagtgatattagtgcttagaagaacaatttatagcaatagattagacaagaagaaagatctaaaatcaataagcttccattttaggaaactaggaaaaaagtaaatttaatccaaaacaaacagaaagaaagaaataataaaaatcagaacacaaggccgggcccggtggctcacgcctgtaatcccagcactttgggaggccgaggcgggcggatcacgaggtcaagagatcaaggccatcctggctaacaaggtgaaaccccatctctactaaaaatacaaaaaattagccaggcgtggtggctggcgcctatagtcccagctactcgggaggctgaggcagaagaatggcgtgaacccgggaggcggagcttgccgtgaggcgagatcgcaccactgcactccagcctgggagactgcgagactccgtctcaaaaaaaaaaaaaaaaaaaaaatcagaacacaaattaatgaattaaaaataggaagaaagcaatagagaaaatctataaaaccaaaagctggttctttgaaaagccttaagatcaataaaattgataaatctctagcccagctaaccaaaaacaaacaaacaaaagcaaacaaaaaaagcaacaacagagaaagagaaaaggttattagattactaattagtaattacaaattactaatatcagaaatgaaagagggatcatcactatcactacttatcccatggatattaaaaggaaaataaagaaatattacaaataagtctatgtctacaaatttgattagataaaatagatccattccttgaaagaaataatttatgaaaactcacacgagaataaacagataatctgaataggcctttatctattaaagaaattagatgaataatcaataacttttcaaaaaagaaagcaccatgccagctagcttcatttggtgagttctaacaaacgtttaagaaggaaatgatacaaattctctacaatctctttcagaatacagaagcagagaaaacacttcctaactcattctgtgaggccagcattaccctaatacctaaaccagataatgatattaccagaaagaaaaactgcataccaatattcctcttgagcatagatgcaaaaaccctcaataaaatatcagcaaattgaatcacaggctgggcaccaatataattccaacactttaagaggccaaagtaggaggattgcttgagtccaggagtttgagaccagcctgggcaatcctgtgagacccagtctctacaaaaaatttttaaaaataaattagccaggtgtgggggcacatgcctgtagccctaaccactcaggaggctaaggcagaaggatcacttaagcccaggactttgagtctgcaatgagccaagattgtgtcactgcactccagcctggtcaacagagcaagaccctatcgctaaggaaaaaaaaagaaaaaaaaaaaggaatcatataccatgaccaatgcgattacttcctcaacttgataaagcaatatctacaaaaaaatcttatagtttaatggaaataaattagacgcttgcctcttaacatcaggaagaaaaagtccccccccttaccattcctgtccaacattggactagaagtcatagctaatgcagtaagacaagaaaaggaaatgaaaggtatagagatttggaaggaagaaataaaattttctgtgttcagtggattgtcaatgtagaaaatcccaatgaattgacaaagaaacctcctgaagtaacaaatgactatagtatgtttgaaggatacaaggttattataggaaagtcaatttttaaaaatatattagcaatgaacaaatggaatttgaaattaaaaacatatttgaagttaaaaccatttacattagcaccaaaataaaataaaatatttaggtataaatctaagagaatatgtgcaagatctatatgaggaaaactagaaaacttagatgaaagaaataaaaagaagatctaaataaatgaagagctacttcatgtttatgaataggaagatcattattgttctttctgacttgatctatggattcaacacaatccaaatgaaaatcccagcaagttattttgtggatattgacacactaattcaaaatttatatgaaaggacaaaagaccagaatagcaaacataacactgaagaagaaaaagaaccaagtcagtggactgacactgctcaactccaaaatttactataaagctctagtaatcaaaacagtatggtattagtaaaagaataggtaactagaccaatggaacagaagagagagtcctggtaggcccctgtgaatatagtcaactgatctttgacacaggagtaaatgcaattcaatgtagagaggttagtcttttcaacaagctgtgctggcacaattgtgcatcaataagcaaaacaaataaataagagaatctaaacacagaacttacacctttcacaaaaatgaagtcaaaatggatcacagacctacgtgtaaaatacaaactataaaatttctagatgataatatgggagaaaatctagatgacctcgggtttggctataaaattttagacacaagaccaagagcaagattcatgaaggaaaaaaattgttaagttgaactttattaagattaaaaacttctcctctgaaaagacattgttaagaaaatgagataagccacagactgggagaaaagtatatgcaaaatatatatctgataaagaacttgtctccaaaatatacaaagaattcttaaaactcaacaattaaaaaaactcaattaaaacatgggcaaaagagctgaacagacatctcaccaaagaagttatacagatgacaaataagcgtatgtaaagatactcaacatcaaatgtctttagggaattgcaaagtaagacaatgaggtggcactatatacctatcaaaatggctaaatccaaaaaactgagtacactaagtgttgacaaggatgtggggcaaaaagaactctcattgattactgtaggaatgcaaaatggtactactactttggaagacagtctggcgtccctcagcatccacaggagatcagttccaggtaaccccaccgctaccaaattctgcagatactcgagttccttatataaaatggtgtagtatttgcatataacctatgcacatcctgctgtatacttcaaattatctctagattacttataatacctaacacaatgtaaatgttatgtaactgttacactgtattttttatttgtatttttaaaattgttatattattttttatttttcttaaaaaaaacctaccaatccatggctgatttaaatctgcacatgtggaatgcatggatatggaagactcactgcatatatatatagacagagagataaatagatacagatgtagatagatacagagatagatatagatattcatagatatggatatgtgaaaggggatttattaggggaattggctcagggctgagaagtcccacatacaacagaccatctttaaagtggagaccctaggaagtcagtggtgtggctcagtccaagtctgatggcccacgaacaagagatgccaatggtgtaactctcagtcccaggcctaaggcctaagtagttggagctggaggggtgggggtgaggggaggacctggtgtaagtcctggattccaaaggtcagagaacctggagttctgacgtccaaagacaggagaagaagagtgtcccagctccatgagggagcagtgaagggggaggagtggggaggtggtgggcaagagagagagagaaagagaaagagagtcatcttggcctttttgttgctgttgttctatttgggcccccagctgattggatggtgcccactcacattgagagtgaatcttcgccatccagttcactaactcacacaccaatctcctatggaaacactgtcacagacacacccagaactaatgctttaccagttctctaggtatcccttactccagtcaagtagacacctgaaattaaccattgcaccatacaatccaaccatcacgtccttggtaattgcccaatcgtgctacaaacttatgtccacacaaaacccacgcacgaatgtttatagtagctttaattatgattgccaaaaactagaagcaagcaaggtgtatctcagtcagtgaatagacgaacaaactgtggcatatctgttcaatggactattattcagagataaaaagaaatgagctggcaagccataaaagacatggagaaaccttaaatgcatattgttaagtgaaaagagccagtctgaaaaggctagatacgatatgattccaacaatatgactttctgaaaaaggctaaactatagagagtaaaaagatcaggcgctcacggaggggagggctgaacagggggagcacagggaatttttagggcagtgaaactattctgtattacactgtaatggtggctacatttgtcaaatgtcaaatcccacagaactgtacaacacaaagagtgaaccttaatgcaaactacagacttgagtcgatcataatataccaaggtttttccattaattataacagcacaatcatgcaagatggtgttataaggaaactgtgtgcatgggaatgggagagtgcatgggaattctgtactatctgctcaattttttctgtaactatatgttctaaaaatattaagcctattaattttttaaaaaaggcttttacagcacctggcctgtgttaggtgcttgataaatgtagctggtgttggcgtcaatcaccggcagttgcattaggagagagcctgctggagaagatacagtcaggagacctgggtctcagcctgagcactgcaggggctattggaggtggcccctaacccgtcccatccttatttccacagctctaaatctggaataagagaaattcctcccctcagtgcagttgggagcactgagtgctgtgttttgcaacaataaagtgtgtgcaaacaatttactgcctgctccaggctgtgggaggaacggatggatgagaggagtggtgggggggaagccctcacagccccgagagctccctggacatgctgttgttgttaacgccaggcttagccaagaccaagggccagaccatcctactaaacacagctctgcccaattctcaggcctgggagaatttgagggccgggacggggctcacatcttcatgtgcctgtgacggttgtcactgcgcaaggcagaccaggactgagactcggggctggcccctgttctgcccctgcctgcctgtggagctgtttctagccctctgagccttggtttcctcctctgtatatagggtcacggtagagctcactgggagtgtgtgcactgtgtggacaagtgactttggaaatggtttgtaatctgtgacacacacacccaccaggaaggatggtggtggttagacagagaaaaagctactgtttgggccaggtgcatactttatcactaaatcctgacagtgccccaaggtagatgtcattgccccatttcaaaggacactgaggctcccagaggtgcagtgccccctctcagggcttcccgagggaaggtagcagagtattgaaacccggcctgtctaactcagctgccggctttctacacaacactggatcctgcggctgctgttcctacaagatctggggatggtgggcaacaagtgtagggagaggggaggcctacatcaaaaagaattcagctttctcccctttgtctgtttttggggggtggggccagacgatgggcagagatcctattctctccaccctcaaggtgactgaggatgaggaaggacaggcactcgcccgacaaaggggcagcgggtgtgactccacctagtctggtggcactacgggtgcagaagtggctttagcaggcctgggagatcagggtctgggtgagcgagggggaggttgagccggcatctctgctggctctcttgcttttattaaaaataattctgacgccaactattttgtaagcgtgtagggcacacatccagagaggcccatctgactgcgagataatttcaaggctgaagaacatcgttcgtgccagacacctcgcacgaggcgctgcgtgaaactggcctacttatccgaggcctcctgtatttcagggggagggggcaagccatgtttatgtataaaggagactgcgctcaacattccaaatgaaaatactcttcaatatttcagtgcatcgttaaccaaatacatttcagctggggcttactccagccgatgtgagcagaggcgtcagatgactcgcagtcggtgactgagggattttgctgagagatggtcatgaggctcagacacccatgggattggtgggttgccgcggctgagccctggtccatgggacatgtgtagcagggcacctgctagatgccagtctcagtgcttggcctcatgcaggcgggaacagctctgtttcctggatgttggcctcatgtcgggggcagatgtccaggccctttcacagtactcaatgtgtgctgtggtcaagggcagcgctgggtgctgcggagcaggtgagacggtactgggcccagcctgagcactgggggaggctctgtgagggaggggacctggggggtggtggtgagcaaggagagggggttcctgcagaggtgggggcctgagggggccggccattctggctggagtgagtgtgaggctagtgatgagtggggatgcagagtggacaggggtccagctctcaaggccctgaaatgcgccaatgtcctcccctggggttggaattgtgagaccagtgactgcaggcagctgggggccggcacaggcctgtaagtgatgggagcaggcagggctcctgcttcacacagccatggacgaggctgccagcaccacatttcctctgtcttccccagcctcactgtccccactgtcgccagggtgggatgaggagggcctggcactctgtcagccaccaagggagagtctgttgcggccacgtcctgaccctctcatctggctgtgaggcaggcccttcttcccatctctgtccccagcacctgcagagcagctggcaggggtaggtgccccagaagcacttcccgagaaagtagtgcagtaggagcaatgggatcacactaggggcagacccgcttcctgagcattttccacaggcagacatggccctgagcgctttccgtgttttgtttcatttcatccatcccaaggtttccaggaggcaggcaccattattatctccactttacacctgatgaacttgaggcttggaggaagttgcctaacttccctgaggttagctagcaagtgaccaagcgcagattgaaagcccagtttgtctgattctggagactgtggctttgggtatatagcaagtcaacccaaggcagcccccggagctgggcacatagctcaggaggcaggcatgtagctcatcaagcagtggaagaaatgtttcttattttggtcaaagagcactcagcatatgtcagataataaacaatgccattcttagatctccctctccaagcaagaggtgtgtggtgtttgagctctcatgggaaggggacgtggggaagactccacagtcagttttttcttcctttgctctcatgttccctttggttactgaaagggacctttagcttatatcttaaaatagcaaaaacatctggctttgaagtaaacaaagttcagaagcccccagatgttggtcttttgttaggaccaggacaagattcttggttgcccagctcaaatgttacctttgcgagtaaaatgtttgtctctcacagctgacaccatgattttgcctttaattgcctaatcttgatgctgtcctcatctcttaccacggagatgtgaaattccactctggaaagagctgagggcaaagtctccatgataagaaggacctcctgagtgcaatttacatgaaataaatgcatcttcactgacaaatttgtttctttatttgaattctgggcaatgagagggctactcgagggctacgacatcccagttttgctgataacatcctcatttagagttctgtgtcctgctggaaattctagaagtgaaaattaaaattcttatcttttttttaaatgacaattaacattggcatgctggagagcataagctacatgttactaaattccatccagctcttgaagagccattgacattctgacagaggtgaaggcaagcccatttggggaatgatgaacccagggtgcagacggggggttccttaggtggggagagccacatattagatgtaggtcactgtcaaattctagcttttgttttgagtggtgagtttgcggatgcttattccattattaaaaatagctaatttaaaaagctaactaaataaaagtaggttatgcgtggatcatgatggaagtgtctcatgaacccagggtgatgggtgatggctaatctaattctatgcacctgaggtctaataaaacacaaaacaaacaatcaaaagcaaatttatttaaacggattatttgagttttagatttcatcatgtgcatgctttttctcactagtttttatttttttcctaattattttaagcaccattttttcttctccatttcaatagcaaggtctccttttgcaggttatttttgttcttaaaggtctcaagcatcagggatctggttaaccccttcagtgggcaccaaagtcttataacggcagaaggaaggtctggctggctgcgggagaggggaagatgctttagcactttgacacagcaggcactgggtatgggtgatgatccagtccaaatgggcgttcagaggaggggagggagaccctgtcaaagagaccacctctactctgagccacggttctcacactcaggattccctgctttgaggatgcagggcatcttttatttttgcatttgtctgctcatcaaacattaactgggcactgggcgagatgctttgcatgttccaggccatgtgctaggccctcaaggatacagaatgcacagtgggtggcttttctgggtcacagcatgctacgtgccttgtatgcgttctatcttaaccctcacagcaaccttcctctgttgcttccccccatgatagctctggtcatatactattgcaatcgtcaactgtatgtcatattcatttgtgactgagagcactgggtataatggaaagggcagcagacactgaagttagactggtttttattcaaatactagggtccccactgtaatatattttttagaggcaggatctctctctgtcacccaggctggagtgcagtggcacaattgcagctcactgcagccttgaactcttgagtgcaagcaattctcctgcctcagcttcccaagtcgctgggactataggcaactgccatcatgcctggtgaatttttaagttttttaatagagacggggtcttgctatgttgcccaggttggtctcgaactcctagcctcaagtagtcctcccatctcagcctcccaaagtgctgggattacaggcatgagccactgctactggcccccactgtaatacttgacgtgtctgtgtaatttcacctctttgaggctcaggttttccatctgttgaatgggaataacaatgcttatctcacaggatggtgtgagaagtaaatgaggtaattcttagcaagcattttttatttttgtctcacataaatgttcagtaaatggtctctttttttcccttaagaggctaggatctgtacctaatttatctttatatccctgcagggcacaatacctggtaacacattcactagctgttagttgaatggatgaatgaatgaatgagtacgtgttctttgagcgtgagaacccaggctctatcattcttcacaggcttctttcttttcagcccccagcagctgtgggatggggaaagccgtctccctcagcatggcacccacacctccagccagtacctaactggatctgagggcctcgaaccccttggatccacaccatggagggaagaaaagaagaccctctggtctttctgctgacacttggcaaaaggaagaacgaccacttaaccacagactgctccttttgctactcagtagcttcctgaacggtcctaagaaggtggctgtctccagatgcccctctccttgagaatcaggggcttggaccagccttgagaaggaggcaagaactgggccctggctggcaccagcagtggctcctgagaccacaggcacagaaggcttcccatgtgtggctttcatgcccaggcccacttcctagacccccaggccctgctatttccttccaggagtgaggaaaactcagaggacggaggaaagggagacaggaggttggacaggcaccctctctgctccagttctgtcctcccagcaggccctgtgagttgacttttatcctcccgctgctgccgtcccctctgactcctgcttcaccagccctgccccctctgtatcacttaagtgaacaagcactgcttggtgtagccctggatggggggagagcaccctgggtgaggaggtaggaggactgagttcaaatcttgccttcttttgctgctccctggctgtgggagtttagacaagtcacttttgctcttggaaccttagggtactcatctgtaaaaaggggtgctgttgcccacctcgaaggcctggcgtgagaatttgcagcgatatatgcacaagtgaagtaatctcaaaactgctgttactactattccacctggtgatgactattccacctagtcaggggctgaggtctggccaagggcctgggagatcccagccctgaatttgcttatcagtatgtgctaaaaataagtatttttctcatttccatagcttggtcagcagaatacggagaccctggcagaccccagaaaacctcaccggagcttgaattgcggacagcccccgtggattccgcttaccgggagcaatttaagaggcaaacaaaacatgaaaaactactcagaattaacaatgggccagatggtaatgctagtttgcagcaataaaacatgataaatagcttcctgctgctactcctgatcaatttcaatatttaataattccactgccactcccaccccctcatctggccccctccgtgggatcctggatgactccccacattcagctcacagagcaaacacttctttgctttctgaaggtgtcagcagaaagtgccgctgctcgattgtcacatgagcactctcagtcctcgaaatgataattaatctgcctacttctcctgaagacgctccatctcacgcctctcctggttgccagggagggctgtaagggagctgccaactgcagagatgcgatagaggcactcatcttgttgattcaatgactgctgctatttcctgggttttgcttttgacttaaagaaaggggagctgcagggagctcggtggtcatctcactctaggaccagtgagtaggagaaggcaacctggaacgggctcgggtggattggtgtttgaaccttatccaccagccatgcctctctaggcctcagtttcctcctctgcacaatggagataatcatatctacctctaggagaattctagccggtgctgcacatgtaaagtgcctgcagagtgcttggcatataagaattggccaagaactggcagccaggagcatcactactaaacacaaagccaaacagcaaatgatgtctgagcgccagtgccctgcaggaaggaccggctgcatctctgtagttgggaagtttctggcccacatgggtgtagggcaggattggctaggggtgcaacagctgccaggcagactgcccccaggattctccccaaggggtgtccactaataagataaactgcctcgcaccatcagcgaggactccaaagacctcagagccaccctggagagcagggattgttggcgccattttacagatgaggaactggagataaggaggtggaatgacttttcaagctgacatgggcaggaaatggcataatcaattctaatctggatctcccaacctgacttcatgtcctctccacagactcacaggagcaagctgccccactcctcacgacccggtgcctcccttctgtgcgtcccttttggagggaggcagccagaagagggcgtggcgtgggtgccagggtgctgcgggctcacagttcctgtgtgatctgtgtcacctgagctgcagtttactcgtctgtgaaatgagactcataatgcctactgcactggtttaccgggacatttaatgaggaaatatgcatgaaaggaccttgaagttttgtgatgagctgtacaaatatcagttatggttattataatttttttagaaaaacaccctctgggctgggcgcagtggctcacgcctgtaatctcagcactttgggaagtcaagacaggcggatcacttgagctcaggagttcaagaccagcctggccaacatgatgaaaccctgtctctactgaaaaaaaaaaaaaaatacaaaattagccgggcatggtggcttgcacctgtaatcccagatacttgggaggctgaggcaggataactgcttgaacctgggaggcagaggttgcagtgagctgagatcgtgccactgcaaccactccagcctgggcaacagagtgagactccgtctcaaagacaaacaaaaaacaaaagagagagagagaaacaccctctgtgagaaaaaagataggaaactcatccacctaaaggtgggttcttctcacagaacccttcaccacagaacctagaggatcaagatcaaattttcttgtgtggcattcaaggctttgacagctcccataaccccatctctaccccttctcacatccctttttgctccagcccatctgggctacttggtatggtctaagctcaacagcctcacctgtgtccaggccacggccaggcaatagccctgccagagtgtctgtcccagccctgttcaccagctgatcccgtacacccttctcctgaagtcttccttggccctccctggatgaggagctcctccgctgagttcccggatagcttctctgagcttctctccctccgagccaggcatcctactacctagcatcattttctcatctgcctcccaatgctacagtgaattctttcaggacgagaaccaagcactataccctccagcccacccaaggctgggcccagcatctgctcaggaaatgtgtgtgaggggtgaacaaatgaatgaataactgagtgttcccagtatggatggaatctgagccttaagcaaaggcaaggaatgctaacggtggtatgagaattcggtagcagacagtgctccagcatttaaattcagctcaatccctgggattatgtctagatctgatggcatcatcttcttcccccatctgaacccttgacaagaaggaacagaaaatataccacccatgcctgtcaggacccccacaggccatggcagaggcatttgtcaaatacctgagtcccgctggtccagggtcatggagttccacctccgtgtgatgtcaatgtagaggatgtccacggcagccatggacaggctgctgctgctgagtttgcagctcctgccaacaatgggaagtgacatgtcactgccagcctgaaacctgtcctgtctatctctcctccactcctgttagggactgaatgtttgtcctccccaaatccataggttgaaatcctatccctccaatgtgatggtgttaggaggtggggcctctgacaggtgattaggtcgtgagggtggagcccttgggaatgggaatagtgctcttctaggaagagacactagagagcctgcctcctctctactctccaccatgtgaacatagaagaaggcagccgtctgcaaaccaggaattgggtcctcaccagacatcagatctaccagcaccttgatcttggtcttcccagcctccagaaccatgagaagtaaatgtttgttgtttaagccactgaggctgtggcatttttgttctagcagcctgaaccgactgacattgtttttgtttggattgtgttctgggtctggaatgtcctcccttaccacagctggaactaccgcagggtgactggcatggagccatggtagagaaggcagtgatgtaagtgaggttagatcctcaggttcctgtaagttcagccatttggttagttatgggtctaacaggctggaaagagcaagaactttagaaaagcaaggcaagtgtttttttttttttttttggatacagagtcttgctctgtcatccaggctggagtgcagtattgtaatctcggctcactgcaacctctgcctcctgggttcaagcagttctccctacgtctgtcccctgagtagctgggattacaggtacccagctaatttttatatttttagtagagacggagtttcaccatgttggccaggctggtcttgaactcctgatctcaggtgatccgcccgcctcggcctccccaagtgctgggattacaggcgtgagccactgtgcctggccaggagagcaagtcttgagttgtagcctggctctgccacttggaagctgcatggccctggttaaaacatttcacctttctgagtctcggtgtcctcatctataaaacaggtggtctttattatagtcattgtgtgtcagcctgaccttgcacagcaatgtgggtccctgcttgctctaaaagagaacaaactccacatgtcaagaaataccaccagcaacgtgtcctcatcttcctatctcttagtctccagaaggaggaggggaagctaggccctcggcactgccctctcctggagtgtccaggcagctgacggtgtcatgctcagatgacccaaggatgacagcatgtcaacagtacaggctgaagccatcactactgtccagaagcaatttcccactggaaatgctcaccagatgagtccctgaggacaaatctatggacaagggctcaaggcttctgtactttacccatctcaatctgtcacctgaagattctacataagccctgaatcagccacactaagccccagatttataaagcagaacagcacaggctgggtccttgctgctctgtgtgggctgacacagaattgctggggaggttccttgttcctgactttaggggagtcacctggaattgacaggaggattgtgggggacgggcctctgagctttggatgctccacttgtttaggtgcagggaggccacagtaaccaggttttcagtctgatgtcagcattggtgctccctgtccatgccacagcaggggtgtttagaatcctcctacccctccccagctttttttttttttggtctggaaatgtggaggggagggcagtctggtatgccaaaaagagcatgatttaggcatcagacagattaggatttaaatcctgactggaatcttttctagctgtgtgactgtggggaatttacttaaaccttctgtgcttttatttcttgggctctaaaatgaagatgataatacctgcccacatggttgtgagtacatgccaagaacccagcatggtgcctgtcacctggtaggcccacagcaattgtgagttcccttccccaactctctcccccttttcccttttcttcctctagatctagagccatctcaccccagaggctgcctggagcccaacctttcagtgagtgaccctgcccgttctggagaaatggagtacaccagttggaatatctgtgtacagggcttgggctctctcttcagactggaagcagcccttggcttgtccaggtgcacccctgtcctggacaggatcgtgctgggaggcctgtcccaaggcaggctagatttgtccagggaatcctgaaagctaggcctctgggccagctgtcaggttggctgaactacattcaatgccgctttcaacttttcaaacgaatccacatccactgcctcagctaatggtgaagtggctctttgatttcccatttgccattatcccttgtgtgaatagctctgttagggaccggacaggggaggggttgattggcaagcagggtttgggcatcagaggcccctctccaaacccaagcgcacccctaatgacagtggctgggcatgtgccccgcatggtgcccagacgagcctggtgctccttgtatgccagcacactttcttgcccccttcctccctcctccctttctttcttcccgcctgtatttcccaggccatcaatgcacatcctgcttcctcctgggctcctgctccgtatttcaatcacgagtcgcggtggcagacttcaaagcacatcagcacacggttattgagccccagtaaccacatgtcaatggacgcggaggttttcacgtcacttgtcaccaagacggctatctactgggttctgtgggggaggatggtccagtctctcccagggtattcgaacagcctgcattgctaatttacaaagcttcattaggaacagccacagtgtcctttaattatcatatcagtgtcctctgggctacctgctcttccacaagtcaggagcgctgcctagcttgctctgtgggttaatagagtattaaaagggaaaccaaactgaccactggtatatagtcattttttttctgacaggtagaaaatagaagtgtcaaacctttagcaggagccgtaatttaccaaagaaattctccgtttattccctttccaaggtaactcttcctccctagtgatgcctgcaaatatagttgattgcagcatctgctactgggacagaggagggatccatgctggctgcggtaggcaggaaatgcaaatgccttaaaagaatcttgattctgtaggcatttcttgggcactatctgtatgctagggcttttcttgctcatcagctctctggattttaaccattccttgagggtggtattcctgatcccatttcaatgaagcgtatgctgaggctcaagagatgggacgtgacttgcccaacgtcacacagccggaattcacatctagtccatccttggaagatagagtagtgggcttgggagctgtggggagatggcccagtccagggctgcaggagggattcaggaatcaagaaaccaggtctcaggccagggaccagaagggttggagcctctaaagcactcctgtggcaagctttgggatatggggctggggctaagcaaccagggtgcttggatttgccctgtggttaccaaacattctcaataaactcaaacaggaaatgaatgactccaacagtcaagatatcaagactttggaatgaatttttcatccatctatccactgaatgagaatttatttgtgtcctctctgtgtaggcagtattctgggcttggacagcaatgaattgctgaatgggccttggataccgttctcagagactatacgtgatcttagagtctggggtaaaaatgtggctcttaatcattgagaacagttttcccttatgcctggggatgcagctcttcaaatgactaatgagtggaaggataaattcttcagtggaagaaaagtccaggaaatagagtaccatgagaagccagaaaagtttctaggaaaggataggttagaaatgtacatggaaaagatgagctttggagtcaaatgcacatgagtttgaaccttggttttgctgcgtaaccttgtgcaggtcatggaagctctctgcgtctacattaggaaatttcgatttgcacagtaagaaaaaggctgctcaccgtacaaggatcttttaaggactagctcagtgcctggcacacatggggaagtggcaaatggcagttcccatccttcctctctgatgtagaaccagtttgaagaaatagtctgtttttgtttttgtttttgttttccagaatcaaaggaatttgggcacataggatgggagagaatcacaaatcatttaagttcattaggagtccaagtatagaaatatttgaaatgatcattctcatttcctcttaacaactactgacatctcatgggaaatttaggaaccaactttttccactccataaaatcctatttatagaatttcttttgtgttcatccttctctgtgcagaaaagaagctttttttttcttctggagaggattctataatgtgaaagctaacaaatgatcaatatttattttttaaaaaccacactacctaaacatctaagggggcaagaagacaactccagtttaaaatgtatgacttcgaaaggccattgacatccaaggcatgcaatattgctggaaagggattgtcacagaagcaggggagattatcaaagtcactgaggagttaatgacagagggggaagcaaggccccttacgctcctattctagaacattctaacacaccacgttgcctctcagagaataaagccccccgcagctacccattacgaagcatgttaatacctccttatgataaaagggagtggaaggggaaaggggaaaggaagaaaaaccttcccctcattcaaaaggaggcccaggatcagaagccacccagtgggagaacctcacatgaagcaaatgctcacgatacagagaagatgctgcatttcctagaaataaacctggttttggcaaactgcttaatttctgggctgccatcacgaaaaatgcagcatacgcaaactgatgtccaattctgatgtgggacacatttgtaaaaattttccttcgtgaattacatagatgccccccaaatcagtaatccaatggaaggagaatgacaaaaatgcatctccctccaagaaagctgtcaagctgaagaatcaatcagataatgtctatttctcggggaaaaaggtggcttcacaccccagcaattattataaaataaaatgttaaaaaagaaagaagaaaagaggcacttaattcatggtaatatgcactactattatgtgcctcctgaggaagtgacatgaaaagctggttagagagagttaagtctagacgagagaagaacagttcattatttcttatttcttggtgaaaaagaaaaatagaatatggccagactggcattagcataattcactccgaaaactgctgatctatgcagcacattatgagagatggacactggaaataaattcaattggagtgtttattattttcttccctctagttctcttcaaggagcttggagagagagagtgggtagaacagatgaaaagcaagttcaacttctgccatttgcgtgggagcgctgagaggagtgtatatctcgccagtgaatatgtctttttcaaagtgctcctgagaagggcacttggttcgatttaacatatggcattaatattattaattcataatgaagcaaaatttaaaccaaagtggaacagagagagagaagggttgttagcaagagaaaatgcgtgctgttaaatttagccggcaagactgaacatacttagagaaatctaaaggcagagaatatcatcttttatgattaggttgctgttaggattttctggcacatttgaaaaagaaaaatccggccgggtgcagtggttcatgcctgtaatcccagcactttgggaggctgaggcgggtggatcacctgaggtcaggagttcaagaccagcctgaccaatatggtgaaaccccatctctactaaaaatacaaaaattagccgggcatggtggtgggcgcctgtagtcccagctactcaggaggctgagacaggagaattacttgaacctgggaggtggaggttgcagtgaacagagattgcaccactgtacttcagcctgggcaacagagcaagactccatctcaaaaaaaaaaaaaagaaagaaaagaaaagaaaaagaaaaacctgttaatcgttgtgcaatgctttctccatttctccctgcattcttaattactacagacatttgttgggaagggagggagcagggagaggggctcagtctgagttcctgtgcactggctgcctggtccccacttgaagaagtggttctcagtgtcacggtcaccatggctccctaatgagtttggccactgattgggaatgatggctgcaggacctaatagtccctaatgtcacaaaacctgggttttcatgcaaatgcccttaattatagagagcaaaagggtgaaaaatcataaagcctatcacatagagacagatttgtggctatatttttgacctcgcctggttccaatctgagagcattttaggaatcttcttggttagagccattctcaattctgctttcttttcaagagtcatagcagtcctcttaataggtacctccttcctctcataccagaggtcacccaccagtggtatctatgggcagtcatgctttcactgaatccacagtgtttaaaattatttttcaaattgccaacatttgtagatgtgtattgagattttacatagatatttaggattgaaaaatcaaaagctctggtaatatgagcccaggagcagccttcctttagacacgggatgtgctctccagcttgccacagccagccttccctccccgaccttgtctacccagccctctgtgatagctgatgcttcctgcctaacctgtaggcaagtgaggtggtgattcttaccataagcaatttttcaaatctccccctctctcgaatctgcccctctctcttctctatgggtaggactttattagaagtaaaaaggaagcatttccatttctaccagcaatttagcctagatgataaacctttctaacttctaaatttgggctatgcatgccatccattctcaggctctccctgctgcctggaaaaatcctgcttttaccagtccaaaccctgcctcctctcgggagcctgctttgattccaccaggcagaggaagcctcccccattctgtacttggagcactctgaatgccaccctgctggggagtccatgagctaccgccctgtgactctacgaaaacattacatttgatgatgtgttcactgcatgctatctgttagactgacagtcctttgagggcaggcagggtcccattatttgcctttgaatgtcccatggctaccaggtgctcaggaacagtcgttaggttaaaccagacataatcctttatagcataactttgagatagaacagatctcacaggaccagggttctctgcaactcccaagatgtcatccacatgaagccaagccattccttcatgttctctgatcttgaattgagtcttctgtgtgatggtgtgaaggctggggagggccaaggaagcttctgcctttgctccaaagatctgtgcccacagatgtcttatgctgagagaagcaccccagcttgctcaatctcataattctccggggccccaaatacttccacggtgccctaagtgccctcatgacctggggcctctgtcactaagctgctttcttatgttacaaggtccaggaatcacaaaggggcagagcctgcctacctatctgttctcttccttctctttttcactataatggggtagcactatgcacagttagaataattctatttcccagcttcctacgcagatggtggtagccagtaagatggaagtggaagtcactaaatgcagcttccaggaaagcttttgaaagggatctaattcatgtgtggaggccttttttcttcctccccttcttcccctttctgcctggaactcaaccatgatggctggattttgagcagccctcttgtgaccataagacaaccctgaagtggaagtatgcacttaggagggatgagcaaaaagacagaaagtggaacatggatcatcctgtggagtcattaatgagctctagaacccccactgcaaaagttcctgttatatgaaagaaagttcctatttaagccattcgtagatggttccctgttactgaaagccaaatgtaattcctaaatgagtcagagagtatcatgtcaggcagtcttttcagtgcaaataataacatgtgcctattgatttttttgaaaattcccactgcctgatggaaataataaccacaagactcccactgaaaaagcagctcccatgaactaggcatcaggccagctgctttatgatatattatcccaacctcataacaaatcctgcaaggcagggatgattgttcccattttgcagatgagagaactgagtgcagagaagataaggaatttatccaaagccacacagctatgaagtaatgtgcttggctctgaagccagacctgtctgatcccaaagcctgtcctctttccactgggcttccctcccccaccctgccctacctcctgaaactaacgcaaagcccttctcaaagtcaccatgcaaaattactacttcaggtgtactgaaacggcaaaattcctgccaatacttctgtgtaccatcctgtcaggaatagcagagggctagagttagaatttataaaacttctttggagacaagtctttgacaaaagtggcttcccactcaagacttctaattattttagtgaataaagctgtgaaaagcatgactttgaggtgcaagacaaaaatattaaaatcactgatgggaaaaacaacagcaatactgagtgctagcagacatcctccttgaggtgtataggatacaattaattgctaaggaataattcactgttgtcgcccattcatatttgttaaagggatctagagttattagattaacatatacttagtgggaaccttctttgatcgagactctgtgtaggaccatatatatatctatatgaattatatataaacatacatataatttcatagaattcttttaatcttgtaagaagaaactgacatttattgatcacttaccatacgctagatgtttctatgcgatctcaactaatattacacacactattgtagggcacaggcagctttatcctcattttacaggatggatttattgaggtttaggggtgctctttgacttgccttagggttacttgccctagaagccagtaaatgctgctgtattgccccaaagtgcccccacagggtagagggaaattaatgtgtaatctcaggaaaccaagcggcaactgctaactttgcaggctgcagcaaagatataatttctttatctcatgctttatcttgaaaattcatgcaaattttgcattacactctataatatggccatgctatttttatattagaacaaatgtattaaaatatttatcagctgagttatttaacttttcccttctgaaactgacactttggaaagatgtgccttgcttctctgttgtggcttcacgaacgccaaacacacagccatgcaccactgggagaagcccagtttaagaagcacaaggtctgcctgactccaaggggcgattattaatatgcgttttcaggactcagctcaaggtaggcacagagttgtttttaaatcatgaacataaggttgcaatgcggtcacacccatcatattcattaattcactcaacaaatgagattctaccatgtgccagccactaggctaatccaagctcaaatggggtactgacccagcaccacagattctcccgagcgcagtcagggagacccgccagccagatgtgagactggactccacccagcccaaagcccaagccagagggggctgttctcactgaccttatgaaggtacgaaagcctgttggccccaacttcattgtccccttgatgcccaggaaccggataaacaaatttgccatcctgtccaccaggcgcaggtagttgaactgttttgcgtacttggggaacacctgcttgaggcaaatggaaggcaggtgggcttcggggttggcgttgcagtctggagcactggtcagctcgccgtccaaagcatcttcctttccagcgaatggtttttcaagctgctgagacctgaagcacacaaagaattaatgatataacactttccctttcagtttctcctttacttgagatttacagcctcctcgggaggcagcattaccagcattttttattttacagacagcaagactgaccacagagaagtgacctgcccaagctcacacagctagcacatagccaagccaggacatgaaaccaaggcagagccacggctagaaatgtatccttcctccttccaccatcctggtttcccagtatgaaaactttcctttactgtattcatgattcaacggaatactctgttatgtagcagtctggatttgatttcaaactcttacttatgggtagtaattgaataattaagaaatataaaaatctcattgaggactggcgagaagccagaacacagttcaacgaacaatttgcaaagatgcatcagctaccgaattctaggaatagaaacaattatatttctggcttaactgttttttttttttaaatttggaattcatacaaaaaatgattatagtgtagtgattccttagtctggatattcagaaattattttgatattcaagaaaactagcagctaataactcttaaatatccacctctagcacagaatgttcttctcaccttagacctatatattattccccctgccccaaatctatgtctcccatctccttgaacgtcacaaccatctgccagttactcaacaggaaagcacagaataaatgccgactcctcctcagctagttctgcctccttagtcctgaagccaacccctgctctgcccctgcttggactgtagcaaaggccctcctgcctctggctttgcccatccatagatccatccttcaaactggcacctgagtcacctctttttaggccagcctggctgagtcacttacttgctaaaaccactgaggactcccaagtctgtactgctcattctggcacttgaggcccttcccgagttcttcccgggcctcctcatttccaatcatccccctgccaggcacacagttccagcccaagccttgtgtgctgctcctcccaacctgccactcactggcctgccctggaaccggagactccatgctccttggacacccagctcccttccacactcaaaggccctctctgcaattgcaggtcagttcccactcctgggtcctatcctgtcgggatctggggccaggcgtagccctctctcacctgttgtgttcattcctgagacagaacctcgagcatgttatacatggtcagtaaatgctgcctggttgactaactgatccaaggaagttaggatgacgtctcgtggtactgagacgtgctgctgttaatggtaccaaggcctgttctctactccttattaaatgtcctcatgcccagtgctttcatttccaagcaagcacaccattagtgcccaggttgggccatctgggtgtctttgtgcctgctttcctctggccgtggctggctggcacacttctgttccactttcaaaaccagctgagatggcttcttgaccacacaggtccctctctctcatgcctcatccctatttcttggacctgcttccttgtttgctttgtcatgcctgcactgcactggtttacatgccagtctctctcaccgttttgtgagctcattgaaggcctacatctgtttcatatagaaatttcactcctatttctataagacctgaaacatacttggtgtttgagaaagtttcattgaatccattgcattgaaaaagtttgcaacgtaagccttaacatatcaaggttataatgctttgtaacctgtaagtgcttttaaattcaatagcgaaacaacatgcgtgatagccctgtacgaacggtcctctcttcatcccagtccaaggagccagcctctgggaaaaactcccttgtgtgaataaaaagtcctggaaggcctattcccggttcctccttagtgggtcttgatgctggtctcaaagcaaggacaggcagagggcagaagcagagaagcatgagggaaaaatctcttttcaacttcaacaatgtggagggttttaaggaaagaaatgctccctcccacaaagaggagagtcctgactccttgggagaggcgaatgtgcccaaagggctgcaattttccttctgctaaaatgattttgtcatcatcaccttgaacttaagacagtaaatatcaggtggttgcttttcagttgaaatgaaatgttttcccattaaggttataggaagaaagatgagaaaaaaggcgacacttttaccggaaattagcccttaaattactgggtaagtggcaatcaatgactttataagcactcagtaagtttttattcaaggaaagatttggaaatgtacagttggaatacactcaataacaacgaaaatagctcagaggactcctcagttggcagatccatccacagtcaggtggtcatctgctcttcactccactttgcacagtagactgttatgactatgcccctgttccagacgaagaaactgaggcttggcaaggtgttgcacctgtatcatctagctgaactggaattataagtcagttcttataatccactgatccactgctctttctattttactactgtaattcttcttctcctttttttttttttttttttggcttcaagccattctcctgcctcagcctcctgagttagctgggattacaggcatgcgccaccacacccagctaatttttttatatttttagtagagacagggtttcaccatgttggtcaggctggtcctgaactcctgacctcaagcaatccacctgcctcagccttccaaagtgctgcgattacaggcatgagccaccgtgcccagtcccgcctcctcctcctcctcctcctcctcctctcttcttcttcttcttcttcttcttcttttttaagagataggggctcactttgtcacccaggctggagtgcagtggtacaaccacagctcactgtagcctaggctcagcctaggtacctgggctcaaacaatcttgcctcagcttcctgagtagctagaactacaggtgtgcaccaccattagcctgactttttttttttttttttttttttgagagacagagtcttgctctgtcacccaggctggagtgtagtggcgtgatcttggctcactgccactgcaacctctgcctcctgggttcaagtgattctcttgtctcagcctcctgagtagctgggattacaggtgtgtgccaccacacctggctaatttttgtatttttatagagatggggttttgccatctctactaaatggtttggccaggctggtctctaactcctgacctcaagtgatccacccacctcagcctcccaaagtgctgggattacaggcgtgagccaccgtgcctggccagtctggttaatttttaagttttttttgtagagataaggtctcgctacattgatcaggctagtcttgaactcaagcgatcctcctgccttggccagcctcccaatatcttgggattataggcatgagcctctgcacccgacccaccaccccattattcaaatatacatcataattcacattgtgggttacaaatcctatgtggaattattgattttttattttatagaattttttaaagattataatagtaagtcatgctctttgtagacattctgagaaatgtataaaggaatcaaaatcatttgtaattctacaagtctgagagcaacactattaacattttgatttcttatctatatttataaagttaggattacattacatgtattccaaatccttctttttataccctacattgtaagtatcttcccatggtattaagagtgttttcatcagtgtaatttctcatgacatgacatattctgtattaattaaccattccccctcagttagagatctagtgtcacatggtctgtcatttgactaaatagagtcagtgatcagtcccctgagtgatgtgctccctctcagaggcataattttttttttttttttttgagacagagacttgttctgtcacccaggctgcagtgcagtggcgtgatctcggctcactgcaacctccgcctcccgggttcaagcgaatctcttgtctcagcctcccaagtagctggaactacaggcgtgtgccactatgtctggctaattttttttttcttttttgtatatttagtagagatggggtttcaccttgttagccaggaagcataaaatcttacagctataagtggctttggagatcactctgtccaacgatgtcatttattattttatcatagtataataatgaacataaagctcaccgttttaaccattttcaagtggacagttcagtggtgtttcaggcattcacactgttgtgtaactgtcaccagtatctagttccagaacatttttgaaatgattctagagaagaaatttaaatccagatagataaggtcatttgatcagcatatcatccagggtcgtgggcttagctggggttgccctggtgatgggaactccaccacctctgggacacctcagactggaaaggtgttcgcaatggtaaccagcaaattgtctttctccagggtccaactcctgcctccagagccttgcagaatgagtctgttttttcttctagcgacagcctttcaaatttctttcaagggttgctgtatttagtggatgactaccatttcccatccttcctgaatcccaattaataacctcacgatgaaaagagtcttcaaagccagagatatcattttcatggactcaaccgcaaattcagagggaggtggttttactcagctggaagaaggcactaacgatacatctgatatgtaagaggaaatgaaacaatgagaaatggtatctttgctggagataattccaattatcatgttgagatccaagccatcacaaatatgtaagatcctgtttttacttaatagcattttaatggaaatgtcgggcttatgaaataaaagtgactggtaaagaaaatataaatcaagctgactagtcctttgggataatttttttaaaactgaatttgttatatccttgattcattaaaataggtgaaagagttctggaatgttttatctattagcatttttcaaatacaatggaatcatttttcattgaaacttgtgaaaaaccacctatctctattttgcctggaaagttaactgttcatttatcaagggcctactacatgtctaacattgctccaagccacttacctatattgcttcatttgtttctcataacaattctacagtgtaggtggaaacgattcccattttacagattaggaaacaggcccagagaggctgaatactttcccaagctcacccaatcagtagtgaaatcaggatttacacttgggactgtctcacaacacaccccatgcttagttcactatatagcttttgtgatcatttgatttaaatcaaatcagagacttttcttcttatgtataagtggtatatagttccagaaattaacagagaagtagatctagcaaggtcaaattctagttgctgagaagttgcttgagttaatttccatctctagttaaacattccttcaataatttattcatccatgaaacatgttccaagcactcacatgccccaggggcctcggatacaagagtgaggtggacacagtccctgtcacccagaagcatgggaccaagtgagggaaaacaagacccatatataaacagtgacttggcagtgtgatgatgagtgagccagcatgggtctaggtcatacaggaccctgaatgtgagagaaaggtgcttggacttagtagtgtagggaatgagagaatgtggtagattttgaggagaggaatggcaagattaaaaccacgctggagacgaataaatctgccagcactatgtattccgaactgagaggggaagggtggatggtattagaaagctactggaatggtctaggtcaacgattctgaaagtgtggtccccagcccagcagcatcagtgcctcctgataacttgttagtaatgtacattcttggatctcaccccagacctactgactcagaaactctgagtgggctgggcagtctgttgtagcaaaccctgcgggtgattctgatacgggctaaggtctaagaatcactggtctaggtgaaagaaagtgagacctaaactagggcagttgtaatgggcatagagacaggcagctttagacacacagatttagcaactactgcttgaacatgtgggacaaaaggggagagaacaccctggatcacgttcccaggcagccccgtggcttggcaggagagccttgtggcagtggtgccgcatggcaaagggacataaacaggtccccgtccctgctgttcggccaaggcgaagtcccctcagtcactagcggattccaaacgcacatgtatcgtgttggcattcctgcagaaaatgctaaccatgcaccaaagaagtcccttaaattagccctgcagctaatttaaagaactggaggatgaagtcactaaaaataaactttactgtatagcccagctctgttgcttgataaatctctgctatcgcagaggctccatttgcctgacgggtgatgctaggcaacttgaagggaaggtgatagactctaaaacaggtgaggcgtgggcttccacagtgacaaggaaaggacttaacgagagagctctgtctgccatccaagtccctctaagacctagacccacgttgagcctattcccacctattccccttcacgcaatgacccttcctccccacaaaccccggtcaggccacttccacctggcttgatcactttcctctgtaacatatcatcgacagcaacaaaacatcaaaacgcaacaaaacacaatagcgatgatattaattgcacatactatgtgccaggaactgcaatttaaaaaaatttaatcttgataaaatcctatgaagcaggtgttattattaatatgatccccattttacagatgaggaaaccaaggcacaaggatatgaaccaatgtgttttgaacctgggaaagaaacccagacaggcgggctccagcatccttgtttctaaccactgcatcatgcggcctccatacacggggagctgtcaggcactcactgaggacctggagagtcaggccggttatttgtaacatctcctttgaccctagcaagaatcctacgaattaggtattacaaatggtcccatttcactgatgagaaaagtgagcttcagagaggttaacctactttcctaaggtggctcagctttgacctcaaagtccaggcgctttccacgccatcatgctcacttgatgtagttatacaacttcactgaactcattttcccctccctggcaatggagagaagtttctggctctgtggggtggcgtgaggctaaagcaggaggatggagcctacgcctagcacaaaacggccacattgtttaggactcaaaacaggctttccacaaagcatcaagatgaatctgcttggggggcttgtaactgtcctcaatgtgacttctcgggagggtaccagtgctcatctggctgcttcgttttgtttgccaaacaagtcaatctgttactttacattccgggctcccaagaattgctgacatgtaatgtttgtaatgtgtgtcgactatatgaattaacaaaggaccccatggcgacaacagcagactaggtctctccctgcctggggatggattcccagagctgccaggcctggggttgctgcaggcgcattttcctgcagggccaggcgacgcattaactgaaggacaagcataaggacttactctaatgccctggctcccacagacccagaactcatgctatttcagagctggaaaggccttttggggtcactgcgcccagccctctcattttacggatgaaggagctgacagctcattttacaaagacctcccaataagcttcttttccaacagggttctctgccctgccggccctgagcatggagcgcgtgtcttcgccattgtccctcttgcccactgggcctgcagcacggtcagaggcaatgaaacattttgtacacataggccaaggaggggtgctccagtcgcctcctcctccctgggctgtggggctggtggtgcagggggtctggagtttgggctttgtgggtagatcagggcatggttgaaatcccagctctgccactcacaagctgtgtgaccttgggcaagtcatacagtctcaaagctttagtttcctctaatataaaatgggaataataatggcacctaacctataggactggtgttaggattagcagagaagatggacacagcacctcaatacctgtttgccacttggattataaccactgacatctttctctcatgagtgtcatcatctcaaggggcccactgtctagtcaccagccctcagtgggagagactggtattcaccccgaggacctcaggagaatatggggtttctgcctcactccccatcccatgtaaccaaacactagattgactttccgctcctccactgctccttcttgggaaactctcattccaggctgtccaggaccacctaacaaaccctccacgtgtgcctcattttctcaggcctggctggggagttcactgtacctgctctgacaccctccttctctattgaggatgaagtaatgcgtgagagagaactttgctgctgcccaggtacagaaaaagtcagattttgagttagaaggggcactagcaatgaccatgtgtcattttccttctgaaatacatagagagtggggccaagtcactgacttgaggtgaggcatcacacaggggtggcaaaggcaggctaaggcccccggacttctcatccagagcctttgagataaaaaagagtgaagaagaagggagagttaagtggctcaagcctataatcctagcactttgggaggctgaggtgggagaactgcttgaagccctgaatctagaccaggctgggcaacatagcgagaccccacttctacaaaaaattaaaaattagtcagctctggtggtacgcacctgcggtcctaactacttgggaggctgaggtgggaggattgcttgaacccgggaaacaagtctgcagtgagccgtgagctgtgccactgcactccagcctgggagatggagcaagaccctgtgtttaaaaaaagaaaaagaaaagaaaaaagaaagaaaaagaagaaaaaaaatgacacagctattgagcataaatgccagagtggccaaaattctgaatgaaaagctcagactcttctagccaccttggcagaaagggaggagaatgccttttgcctgaaggacttcagagccccctttaaagctactgaatagttggccactgcctttccgtagatgaattggctggtgcttagcttttctctggaacccagagaaagattttttgaagtataagccctgcctgcaccaactgcccaaggcacggtgaacaaggtccccaggcctgagagagcattccaggtctgcatggcctggttgctgcctccctcatcctccacatccacatccctccctccttttataaatgatccactagaaaaacagccatctttcaaatttaagattctctctcacctttcccaaaatgcttcccacggcttttggagatagaatcaaccattcctttctctataacctccccgacttagtatttcatcatcatcatcaagaaattttttgagaactcaatctgcatcttgcacaatgctaagcccacagtatacattattttttcttcagagtagttatcacactccaatggctatttgcataactgtctgcttaatgcctatttcttttctagacggaaagttcccagaagggcaggcaccattactgcctggtttatgactatacctacagccccagcacagctcccagtacgcagtaggtgcttaaaaatatctgacaatgaatacagtcattatttcagtgaattctcacaacaatccaattagttagtcacagttactaacgtgagtttacacctgaggacgctgaagcgtgggaaggttaagtcaatggcctaagcgaggaggctgggattggaacctgggtggtctgtctccacagcccacgtgttaaacccctgcactacccctgtatttctacacccctctacttctggttgccagcatgaatctttttttcctcttgttctctcacagtccctgggaaaagcctgtctctaccctggaagaacaaaaatttcctaatggcaacagcaagagactgtctatatgacaactgtaatcagtggttgtattagcctctgttttaccacctccaaaattagcagaaaaggccaacttgagctttcattgtacagctctgctaatgaagggatccttttaattacatactcagtgcctatctgcaacacaaagcattttagtgtttaaacacagttctgtaccaaagtatagggctatgtgaatacagacaataagttgggggaagccatgtgtaaaagttattctttgcctagactgtaatttctttttgacagtcaatttcatctaaacccagttcattttctatggtaatcctaattctcttctatacactgagcacccgatgaacccttattcagtaattccgtaggcatatcccaggtcagatactccctcttcagattgcagatgacatctgcacactttgttaatttcactcatcactgactgatttgctttgagggctctcgccacttacctgcgctggcacatcggtcaattcccgcggtacaggtgttgaacacaaaaccagcttcactcagcatcacgccaggagttcatgacatttgtatcccactttccaaagcaatttttgagtgccattctgtatgggatttgcactgatgcgaatgaggccttacgaggcagatcccacagacctttctcagacaagggtgtcctgaccttgcatttgtatttggtcaggggaaaaagggaatcactcttagtgagcccctcctttgggccagagactctaacaggcattaattaccctggttaaaccacacagagaccttaagatggagatattaagatgcacctccagagccagaatgagtgggttggaatcctgcccctgttcccaactagctggtaatctttgaaaagtctcttatcctgctcatgccttgatgtcttcatctgtataatagggataataactctccctatgtcgcagcattgttgtgagaattaaatgggctaatccattcagagccatacctggaacgtggcaagcactcagtaagtgttagctgctgtgactgaacaaacaaagctaagctcaggttaaacacaacactcaaagtcacgtgcctcctaaacagtatcaactggtaaccaggacctgtctgatgcttaagaccctaggcttccagggaggctaggtcaagggggctcactgctggtccacccctagaagactgtagtcagcgccctggcctggcagagcgtgacctagaggaagtctttccatgtgcatggtcccctcctggccgcagcacgagaacactggcttctgcctccactgcccacatactgttctctcaagggtgaccatgcacctcctaattgtcactgatcttcttaatctttctccaatcttgcttgttcacagcattcaatgaagctgaccactgtcttcctgaacctctcatttcctggctcctgcacccatgcactctctgtggtgtttttccaacctctgttttccctcctctaggacccttagtagtaggtggtcctctaagtccctgtccttgacctgctccctgcccacagtcttcctgggcgttcttattcacaaactcgatggcctgtacctcgtgccacctctctgtgtctgggatgcctctgtcctgcccaccccttcacgacagccaagtccaaatcctgctcattcttccaagctcactctagacaccagcccacagccttcctggatccttcccactcagaaatactctcttcctgattcccacagtactttatagtggaatttatcattttctaaatttatatcacagtcatttaagtttgtggcttctttttcctgatagactctgagtttgccagaaatagaatccatttttgttcttctggcagtactgtacatctaataggtgatacaaaaaacacatgctgatacatgattgtgtaagtaaagtattctttaagacagagaacatgaagaatttggggtaattttgcctgaagacaagaaaatgggcagggtgacctttgggcgtcatttttcagcttatgggtctataaacccatctttagggcaaaaataccacattaataatttatggtgatgagaataacggtcattctggttccaccccttaccaattgtgtggccttaggaaatggagatcaatactcagcctctggttctcttctgtaaaatggagatggacgatagaatccactctccagaggtgttgagggacttgatggggtggtataaacaaggggctggcaccctggttggaacatcgtaagtaccaaagaaatggtagctgttatatgactcctttgacatatatttattgagtactaactctgcagctagggatgttgggtcaactcaagccccacctcctccaggaagatttcgcggcctccttcgacccatgacattctttcctcaaagaactctggtcctatcaagattagattttttaaagaatctgactaataaattaggcatgcctattagcagtcaggtccagagaaaaagtctaactttttactttatgcaatttgaattccctgaacatagagttgttgtcaaaatccattaaagtatttaatttctcttgtcactgcacaattccccaagcagacatccagacagtttgcagtggtgtttctcacagaagtactaaatgtttagttatcaaggtacattttttagatgatgcctccctgatggctctggagactctagagagactgtgtaagttcaagcgcaaggttaaggcaggcagcagagtggcgagagctgcagggaggatgaatcacgcaggcctgggcttcagctctgacactgccacttcctggctgactgaccttggggaaggtacttaaccttactgagcatcagtttcctcatttgcaaagtggtgacagcaccaaacccacagggctttagtgagcacgaagtggaataccaaatgtaaagaacccaggagaatgccagacacatcgctggtccacgatacaagatggcttaaaaatcccagagatttgcagatgcacagactggggtctagaggctgccgtccccatccacctccccctcccagagggacagccctaaggagcagtgtgtttatggcgacacaatggccagacccacagggtcctgcctcttcacagtagcctctcccaacacccattcaaatcaattattaccccacttgaccgactcacccggtgggagccaaaggtttccatgccaacaggaatgtggtgggcatcccaacccccaagaaagaaaacaaaagcgactcttttagtttccctactaacaagcgcggagctgaagtcagagctgtctctttctcagttgtcatggcaacatccactgacctaccccgtcctgccaaacacacacgcgggagagggagagggcaagggggatgtgtgggaggtggtggtccagggatgaggggcagcagaaacgctccacaatgctcgggagaaaagtacaaaaacacccacttttacaaaaaaaaaccactggcaaatgcaccccccttgccagggaatggagaaattccagtttttattgtgtcgttcctttggcaattatgaacaaatttagagcctattcaaaaggccagttcaaaccagaagagggaacaattattaatttctcagctatgacacagagacagggggcacttcacttgtacctctcctgtcctgctcagcatttgggagactggggttgacgctactgtctgctgcctctcgccacagctcagggcacaatctacagggcaatttcccattcctgacctaatgcagcctcaacaacagcttgggaagaacaaagcaaggcacccactctgcaggcaagaaaactgaatgccgtgaccacaaacccatgagtacccacttctgttttctgttttctagtttgctctctgcccccagaagtcttcacccaggaaaacacttgaatttgcccagatgggatcaattatttcccacactcttagtcctcgtgtagctttgaagaatcattttctggaagtccaacacctgccagaaaatccacccagatagcccacttgcatctcggtaatccaacgttccaggatgaagataatacatccccttgaacctgcttcttgctatttccatgttgttactggcaacttcatcaccccagtgagccaagctcaaaaccctgaagtcagcttcggattctccctcttcctcagcctggtttctggggacttgtacagaagtcttccactgtccgttttccatttggaggctctgattcaaatattctggggcatcctagcaagtggaaagcagtgagcagtggttaaccacaaaggctgtggggtcaggatgctggagctctcgctgcttggacacctgtgtgctaagcacatcctcttatttgattctcaccacgaccctttgaggttaggattcttcttcatatgattcccagtttccataagagaccgtttccctatgagacacagaaaaatggcataatttgcccaaggtcatccagcttagaagtggcaaagccggcttatgattctggattggctggacttagaactctgactctgaaccaatatgcatagctccttcccactcaaccacaactctttttctttctttcttttctttctttgagacagggtttcactctgttgcacaagctggactgcaatggtgtgattatggctcacggcagccccaaactcctggcctcatgcaatcctcttgcctcagcctctcaagtagctgggactaaaggcacagttcaccactcctgcctagttttggtatctttagtagagacagagtttctctatgttgtccaggctggcctctaactcctgggctcaaggaaaccttctgccttggactcccaaagtgctgggattacaggcatgagccaccgtgcccagcctataactttcttaggaacagggcccatcacttcatgtttatatctcagcactgacaccagggcctgccttgcagcacctgatgagtgccacctgatcaaagctccatagagtgtcttagctcagagctgaccagcctgggttccgtgccctatgagaccccttctccatatgtgactttgggggaaccattaggtaacagctggaaggctgcagtgggctgaacactgtcccccagaagatatatccaagtcctaacccctgaaacctgtgaatgtgaccttttttggaaaaaaagagtctttgcagatataattaaggatcccaagatcattctggatttagagagagccctaaatctggggacagatgttcttataggagagagatagagggagatttgatgcagacatacacagaggagaaggccatgggaaccgagggcagaggctggagtcatgttacctggccaagagctaccaaatgctggaaaaggcaaggaaggattctcctctagagctttggagggggcatggccctgcggacaccctgctctcagacttctggcctccagcactgtgaaagaagacatttctgttgttctaagtcacgcagtttgaggtaactttttaggcagccctaggaaactgatgtaagagtccagtgtccttatgtccaacctaggtacccttgggggttactgtgagatcatgtaactggaagcaactagaatagtgcctggtgcacagtaggccctcaatagatgctagctgaacagcactaaaacattctcagtcaatatcctggaaacttctttcccaaggcacacctggctgactgcctctgtctatattctcaagcttgtaaaatgtttaacttcagaacccacgagccagaaggaggagccacagggagtatctccctttgagctcagctgcgtgggatgaacgggcagccagcagagatgttggtgtccttgcgaggctggtaactaagtactggcccatctccagaccaggatgatgagcctgtcacggtgggtttcacaaaacatctgtttcaggaacaagcctattgtttcaggcaagctctagagataatagtatgtttttcctacatacagccatgacatgttcactgaagcgaatatctctaaatgtgaccaatttcttaagtggcagaagcccatcaaactctttgagaacatatatggcatgtgggcagcccaagcagcttcctttgctgccacagagctaaaagcaacactcattctggcttgcagggaggcggtgagagtgggtggaggtagcggtggcgatttctctgaaattggtccctctaaaggttatgcttcattctgcaagggagtcaggtccccaggcttcatgcatatggatggcaatggtggttgaatgataacctgcaatttctcttccccacgttaatcgacttgggttggctaccaagaatttgactaggaatcgcgatgccagtgcacataccaatgatcccaggatctcagctcagctctgccggcttcaactcaattctggcctgaaataagaaagcactagctcggtgtcccgtgtgagatgagcagactatgccttggcatgggatagagagacggccagaaggccgaccacagcgaggagagctgggacactttcccacaggcgaggggaaacttgggccaatgaagcaaatgcttcaagatcccccatgaagaaagtgcctcccccgcagcaagctgtcccccgtcctttctcccaggggaggagtgggatgtgagctccttccctcggcacacagatcaagtctggaatacatctggtgtctggtgtgctgcttggaagtcaggcctgaactgcctgggggcccccaggcaaccccaacacccagtgggggtctggagtgagtcagcttcctggccccgggagcccagttagcctgaagctgccctggctattggaacctccactcttaaaccctctttgctcacccgggtgggacactggcctgcagccttggcccaggtcccctctccagttcctggctctatccccctccccttcctcaccagactgctgctgggatcccaggatgccatagggttaagcccatcctggctgactgagaaggtcccaaggccaagtctttatagctcagaaggcagtggctctggtataacctcccctaattatcctgtgccctgcagactgctcccagagagcactgggcaaaggagtcaacacatctgaagaggaaatagcttcaagtcatagagaccagcaagttcaaggtcctcattctgcctgtagacaagttctggagatgggaggtgtggcttgttcaaggtttcccagcacttaggttttagggctcaggaaagaacccgggtttctgcactcctagtgcagtttgctgtgacaacgtccttggctcttctttgggccagttcagctctttgtagacaggggctgtgtctgactcatttctgactctccagcaacagcatggggccaggcccggagcagggaatcagtcaatgttacttagacttggctgaatcagtcccctttgtaaaacgaataaattagacacagacacattactgaagcctgcacaaagatatggcttcaggatcttcaaatacctcaactacgagcaggggggtgctatttctgcctataaaatggcatggaagtagaaaaagatgttaggtcactatgtgaatttttccttgcataactgtgatcctgtgtccacacagtaacagccgctatggactggaggttgtggctgacatgcaggcactggactgggggccttggacacaggtccaatttagtcctgctctcagccctgccaggcaggaactatcagcccagatagcgcttgataataggtagaaactgaggcttaagccagttcagtgctttgcccaaggacacatagctcccaaatgctagagcatggattttagtccaggtctgtgctgttttacctggattgggttgttctgacattagaatagcaataatatctaatacatcgtgagtttactctgtggcaggcatgttaggtgcatggattcatttaattctcacaacaaccctatgaggtatctctactttacagacggggaaaaataggcccagagaagtgaagtaattttaccaagtaatcaaagccagcctagaagacagggagggaatagtgagagacagagagagctcagaataagaggctggaggtgcacgaggagctctggagttgggctggatttgctcgctatgtgattttgggcaaattacttggaatacttttttaatttttggaaaaatatatataacatacaatttaccattttaactattttaagtgtgtaattcagcagcatgatgtacattcattgctgtgcagccatcatcaccttccatctccagaacttttctcatagttctccactgaaactctgtccctatcaaacaataactctcgactcccccacatcacccccagcaaccaccactctactttctgactctatgaatttgactactctaggtgcctcacacaagtggaatcatggctgggcgcagtggctcacgcctgtaatcccagcactttgggaggccgagatgggtggatcacgaggtcaggagtttgagaccagcctggccaacatggtgaaaccccgtctctactaaaaatacaaaaatcagcagggcatgcgggcgtttgcctgtaattccagctactctggcggctgaggcaggagaatcacttgaaatcaggaggcggaggttgcagtgagccaagatcgcaccactatactccagcctgggcaacagagcaagactccatcttgggcggggcggggggggaggtgaggctggggaggaaagtggaatcatatagtgtttgtcctgtgtatctggcttatttcacttagcataatgtcctaagggttcatctatgctgtagcatgtttcagaatatccttccttttaaaggctgagtctgtttattcattcattcattcattcatggacattgtaaataatgctgctataaacaaggtgaacagggcaagttacttttcagttagtcatttttctaccccaattctgagcctccagctttgttcctgactcagaggagggattccccatccatccagtgtctgggccagaaaccagagagaagagattcattctccctctcccctcacaagcatcaagccagccaagtcctatccctcctgtcactgcagttcacacacatctctgccatcacttgtcagctcatcatgggtcacctgaacttcaacagcctcttcaccagtttcctggctcgcaacctccgcttccaatgtgtccttcatgtcatagccaaaatccccaagcctgtccctggctcactccctcatttccttcaagtgtgtgtccaagtgtgcccttctcaggcaggcctcccccaagcactctgcttacaagtgcagcccacaatcttcccagccctccagagctctccctgcttcattttctccatagcgctcatcaccactcatcacagtatagattttactcatttattttgtttattttccatctcctgtcctctcatcctccacctcccatcaataatggcagttcacaaaggcaggtattgttgacagttttgtgcactgctgactcctccatcctggtgcagagtaagtgctcaataaacactggctaggtgcatgaatgcatgaatgggtgcatgaatgcatgaatgactggctcttctctgcctgcagagtgaagtctaaactctctggcctggtcaagcccttgactttgggtccctctctggccccatctcagaccacagtcctatttaagctccagccacattgccctgcccactaagccctcctgctgtctgatagacaaagaccctaagcctttgcatgaaactggcctctgcctggaacttcattccttccaccttgccccacccttctgctggtttgtggggcccccttcactaggctcccatgacaccctgtttttaaccccttttgaagcccttttcacgctatattacaatcgtccttgaacccatctctagctgttctaaactgccagctccaccagggcaggaagaccttgctcacactgggattctaagcgctgttcactgagcacatcatagctgcacagaaagtatctactgaaaaacacgagcaaccttgagagtctccactgcttcaacctgaaacaatggcgatgccactcctgcagggttgcccgaggatcagagatcacatacgatatgtacaacatctgccaccgtgcctggcacagggcaggcatttaacacctagcagttcagtgctagcctttgatgcaacagcgggatcacaacgatttaggaagatctgctgcctttgtttagaagccaccagctgaagtccttccataatttgtcatctctggggccagccggtaagtgttggccccagaaaaaatccctgtcctttcctgtcttatccatcacattttggcagcatgctcactgagcatagaaaacgtccaagttcactttcttctcagaactgactgtatctataatcatcgtgtcacggaactgagaacttccagggatttcaaggaccaactgtgctgatccctcattttacacctgaggatacaggctcagagaggttgtctaacttgctcatagtcactcagccagataggagtttcaccttctctttcctttatgcacaatttcaattctctctggttgaacctgttggaccctaaaggatttgagggtttagtctaaaattctcacctgggctaaatcctcaccattatcatcatatatatacgtgtgtgtatatatatgatgataatatatatacacatatatatgagatatatatatcttatatatctcatatatatgagataatatcactataatataaaacctatatataggttttatatataaatatatattaaaaaatataaaaaatatataaactatatatgtagtgatgataatatctatcaattatgaaagttaaaaagtctccttctacctttatatatatacacacatacatatacatatatacacagatatatatatacacacacatatatatacatatatacatatatacatatatatatataatcttccaatcagcagcatcaagttcattttagacattggaaactcttactgggaaactgtgttagtccatttgcatgcttctgataaaggcatacctaagactgagaggaaaaataggtttaatggactcacaattccacatgggggggtgctcacaatcatggcggaaggcaaaaggcacttcttaagtggtggcaagagagaatgagagtcaaatgaaaggggtttccccttataaaaccatcagatttcgtgaaacttattcactaccacaagaactgtatgggggaaaccgcctccattattcaattatctcccaccgggtctctcccacaacacgtgggaattatgggagctacaattcaagatgagatttgggtggggacacagagccaaaccatatcaagaaccttttctgcaacccaaacagaagaaattttactcttactgtccccctgaatgaatgacctgccatccacagagggatggcaatgtcccgccacattctccatggaagagaagctcctccctggaaaatacctctgcctgcccagaagtgaggtcccctttgtcgtggccactggcagtactgttgctggactgttttgagtggggaaggaggccgctgtgggagcagtgtcaggtctggcagtcagggggttgcagaaggatcaggaaggccgtgaagggggccccagttggaagtgagcccagaactccccctcactgggaagggagctctgagtcatcaaccaccacctacagactaattcacaacctatggtcccagaggaaatcattagttctaagtattattattaggcataataactaattagtaaaaatagctaccatttaccgagtgccaacttatgcctgatacttaatgcatattatttctttttcctattttatgcctttaagtttatttcctattttcctaattataaagtcaatatatgttcatgtaaaaaaaatagttaaatataccaaaaagcagacaaagagggaaaaaaatcacagtttattccattacgtacctacgaccattgttaacatgttggtgttttatttccagaatttcttctctgtctgtctctctagccttctccatgcatgcatatgtgtgtgtgtgtgtgtgtgaggggggccatgtgagatttaacatagttgtgaccatgattttacaaaaaattacctctaacttctacaacaatcctctgagttaggtactattatccccattttacagatgagaaacctgaggctcagagaagatgaataatttgcccagtgtcccacagcaggtctatggcgggagagggactcatatcaagtctttctgttatcaaaacatgtcctttccccactctgcgatgttccttcccacttaacaaggaagaactggggatagtttaattacctctacgtctgctatcccattcctctgcctgtatctgctggaccacaccccacagagagctgtaggtaagggagacaaagattatcccacttacgtctactcaatgggcagtacccaaggatggaaagctttgaaagcttaagcttagatggagacattctgtcagaaactggagggaatctgttttctgtgcatacagatatctggaaagctgaaatcagaaagcacaatgaactattctttgcaagctgttttgcatgagaaaaatgtaagtatcatctgaagagcagctgcaggatggcctccaaagctctaaggggctgggccaccacgagccacacctgtggggaggaagtaatgagcacctggattccacgtttcaccaaatgtttgagcaaagccatgggtactaagtgtcttcatgttggtaccaagcagataaacatgtgacatctctctcctatatgccaagcactgggcacggggtctataaaataaatgagacagtgtccctgcctgcaaggagcctacagcctggtgcaggagacccctaaaagaagagacttataccaggatgtaggaagtgctgagatggagacacagaaacctttctggagaaatagaaacgcttttacactgttggtgggagtgtaaattagttcaaccattgtggaagaaagtgtggcaattcctcagggatctggaaccagaaatgccatttgatccagcaatcccattactgggtatatacccgaaggattataaatcattctactataaagacacatgcacaccacatatgtttattgcagcactagtcacaatagcaaagacttggaaccaacccaaattcccatcaatgatagactggataaagaaaatgttgcacatatacaccatggaatactatgcagccataaaaaagggaagagttcatgtcctttgcagagacatggatgaagctggaaaccatcattctcagcaaactaacacaggaacagaaaatcaaacaccacaagttctcactcataagtgggagttgaaacaatgagaacacatggacacaaggaggggaacatcacacaccagggcctgtcggggggtggggactaggggagggatagcattaggagaaatacctaatgtagatgacaggttgatgggtgcagcaaaccaccatggcacattgtatacctatgtaacaaacctgcaccttctgcacgtgtatcccagaacttaaagtataatttttttaaaaaagggttaaaaaattggaccctcaaggtccaatccctaaaaacgttaagatgggagaattcatggttgagaagaaaagtcagcgggggtcaggggaggtgggaccaacgacaggaataaactgattaaagcctttttagccacgtcctatgctcgtttaaatgaaaagataaagacaggggactaaataaagatatatctttatcttacatgtcttaaatgtagtaacaatgagcttccacacttcactccctacagagttttcagaatccttctctctttcatcttgaaaagatgtctggaacgttttgctttgctgcagataatgttcacaatgaacctcatttgtgtgtgtgtgtctgtgtgagctatgtttgtgtgtgtttgtgtagctgtgtttgtgtatgtgagtgtgtgcacagagttgtgtttgtgtggctgtgtgcgtgtgtgtgtattgtgtgatgtgcggttgtatgattgtgtgtttgtgtgactgtgtgtgcatgagtgtgcgctgcgtgtgtgtctgtgcacgtttgtgtggttgtgtaaatgtgtggttgtatgagtgttagtgtgtgtggttgtgtgtagttttgtgtttgtatgactgtgactgtgactgtgtgtttcgttgtacatatgtgtgtgtctgtgtggttgtgtgtttgtgtgactgtgtgtggttgtgtatgtgtgtctgtgtgaacatgtggtcatgtgtgcttatgagtgtgtgtgtatgtgtggttgtgtgtgtttatgtgtgtctgtgtgaatgtgtgattgtgtgggtttgtgtgactgtgtgtgattgtatctgtgtgcgtccgtgtggttgtgtgttattgttttgtgttagtgtgtgggtgtgtgtgtgtctgtggatgtgcgggtgttttgtgtgtttgtgtatgtgtgtatgtgtggttgtgtgtatgaatgtgttgtgtgggtttgtgtgactgtgtgtcattgtatctgtgtgtgtccctttgtgtggatgtgtgggtgtgtctgtgtgggtgtgtttgtgtgggtgtgggtgtgtgggtgtgggtgtgtgtctgtggtgggtgttttgtgtgagtgtgtatgtgtggttgtgtgtgtgtatgaatgtgtggttgtgtacatttgtgtggctgtgtgtcattgtatctgtgtgtgcccgtttggttgtgtgtgtttgtgtgtgtttttgagtgtgtgtgctccgccatctacaggttctgttatctctaactgagtaagcaggagccgttaaattctgcctctggctcccacccaagacacggaatgctgggaatggttccaccttggtccagcgcagcagattaatctagaaagaatagacacatttcttacggcgcccaacacgggctcccctttccggggctaggtggctttagcctagagttcccaactgtgggccaggaacccacccctcagcccttcacttttagtcatcttcctcttaacactcctggaggtcagttccacagccccagctgctgccctcagctctcccatctcacacacagtcttggtgcccaacctcttcggtgtcactttctctcctacctcttccctctcatgtctcgactccaaggccctctttctcctggaaatcgggacatgattcggaactcacacttctcccgggtcgggacataagtcaggactcacacttctgggtccgaggttgcatagatgggcgtgcaggaggccatctgcaggtgcctgaacttcagtgcggggtcctggcggcggggcggcagggatgactacgcagaccctggccctgaggcgggaggaagcacctccttcacccgccgcaagaggaacaggctgttccagccgagatcatttcggaaacgatgctgcggctagcctgggaatggggatctgtttgtgggtgtcatggccatcccacgccaaaagaaaaacgcgtacagggatccgaggcacgaaccagccgcgcactacagaccacgcctcgagtcagctgtaggtcttttccttatgaccgcttcccaaactggctctgcaaagtcagtgtcaaccaatcacctattccacaaatttgattcaggccacattaatttgcgtttgacctaacagtctagcagtcaatagacttattaaggaaacctgaatgactaagaatgtcagccagccagccatgcacacacaggaaaagatcaaaagggggacctttgtgagagaaggcatggctcacccccacacagaggctatgtgcttgcagtagtttttttccagttatgaaaaaataaaaccatactggttttccacagcggatatccactgggtgcttttagacctcataacaagcctgccaggcaggacacaggcccagagaggttaagcacctcactcgagatcacacagctagcacgcggtagaactgaggctcaaacctgagcagcctgagccgctcttcgttgttgcctcttctgggggctgcggtcattcttcaggccctggcttcggctcatttttctctctcttctctccagatactcagcctcatcagtgctccggccatcatctctgcgatgactccagattgatctaattttcccttctcaccaggattccagcccactctgcaagtccctgctgaatgtcgactcttggctaccccgcatcccacaagcccaccttcccaggcatttccctccaggcacacacacacacacacacacacgcgcgcgcgaagtctccaactgccccgggagggtgttctcaattgcaggagagcccttaaaggccacctcctcagggaagctttctctgcccatgtctccattctgatgcatccctgggtactcagtttccccttggtcctgactgtaccgggcacagcctctgctgctgtgttttccctcatttcactgcatttctccccatcaaatggatgtttttccttcttctccctttctcccttctcttttctcctctccttcccttccctctctttcttctattctttttttttttttgagatggagcctagctctgtcacccaggctggagtgcagtgatgcaatctcagctcactgcaatctctgcctccttggttcaagcaactctcatgcctcagcctcccgagtagctgggactacaggcacctgccaccacacctggcttgtttgtttgtttaagtagagacagggtttcaccatgttggccaggctggtcttgagctcctgacctcaagtgacctgcctcagcctgccaaagtgctgggattacaggcatgagccaccatgtccggctccattcttccattcttaaaacctgctgtcaccacccccacccccacagagagaaaagctgggacgctagaaagggagagacggtgcttgggaaaaaggaggctggggagccctgttctcaagtgaggggccaggaggcactgctgctgcctctttggccctgaaaaggggatgtgggggcttcaggcagatggggtaaccccactggctgcaatagggatagcagaggtggctgaagtggaacagggagccaggacaggaaaccataggcccaagggaatgacaggcctgagagggtggggcagggccaggcctggaaggcaaaatggctgccagtgtgggggctctggcaatgcagggtcctaacgctcccaccacagagcaacccaaggtcaagtgcttgatggccgtgtgtccaccgatgggccaggcacggtgggctccctgggcatggcacttaatgggagcaggtcattctggccatctccatcagtgcagcagcatgatcaccactcactgcagcctcaaacctctgggatcaagcgatcctcttgcctcagcctcctgagtggctaagactacagccacatacatggtttagacttcacgcaacacatccacgtgtgcagctgaggaatgtggtgagatgcatgtctggccagctgctgggcagggaaggagccataagcaccctctccttgtcctcatgcctgcttctgttgctgggtgcccttcttctttgcctggctcctgataactcgggaaatcttggcattgcagaggggccctctcctgctccatcagcccctgtgctcatcagacctgagcccctgtcaggggccatgctgtgtcaatgagctgcttacatcacctcctccctgggcccctctgctccagctctgctggccaccttgcagctccttgaacttgccaggcacaactccgtctcaaggcctctgcacttgatggctgccctgcctggagagctcttcctccctcagcttgctccctctatcctctgcgtgtttactcaacaccgccttctcaataagccctgccctaaacactctttatgcacttctctgctttattttttctgtcttaatacttatcacctattaattcactctgtgtgtgtgtgtatgtgtgtgtgtatatatatatacatatatatatatatatatatatatacacacacacacacatttagagacagagtctcagtctttcacccaagctggagtgcagtggcacaattaaagctcactgcggccttgaatgcctgggctcaaaagatcctcctgcctcagcctcccaagtggttgggactacaggtgcaccaccatgcccagctaatttatttttattttttgtagagacagggtcttgctatgttgcccaggctggtcttgaactcctggcctcaagcaatcctcctgcctcagtctcccaaagtgctgagattacaagcatgagataccttgccaggcccaccctatattttaattaattttttcctccattttctcccttcttctatcccaccaccactagaacgtaagctccatgacatttgggtttttgtctgtttcattctctgctacattcccagtgactaaagacagtgccacgtgcatatcacatgcttggtaaacacatgttgaatgactaaatttaaaaattacccttccaaatgtctcttaggagttttacattgtatcttatttaactctgtcaataaccctatgcagtagacactatttcccccactttatggaggaagaaacagtagccaatgagtgacaagaatggctcaaaaagtacttatgcctagtaagtgagatttgaaaccaggacagcctctctaatgcctgtgtttattacactctccacatcacacaagggtgtctcctaatagtcccaatggcctctggacctaaatttagcatttaactagagcatcttgcctttagtgagggtctgttgctcctagttctcaagcgtctttattttgcctcttctcttgaaagacaggttcatagagtacataattctaagttttcagttattttctctgagcactcaaacagatttcactgacttgtgaattgcattgttactgttgcgaagtcagctgtcagtcttaattaccactgtgtgttagcacataatctgccttgtatctctggtagcttttatgatcttttctttgtctttgttatttagcagtttcacagtatatctacccgtggatttctttttattttgcttgaaattcagtgggcttcctgtcaaagatcattgatgtctttcgtttctattctcattggaaaattctcagccttaacgtctttgaatatcaactctctaccttctttctattatctccttctggaactcccattggatgtatgaccttcttattctatcctacattcttaaaattcttccattgtgtttcccatctcattatttgtttgtgctaaattctgactaatttcttcaaatgtatctttcagttgtttatcaggtctctaatttatttttaagtgagtctaatctgccattaaacccactgagttcctattttatttttatttgcttatttatttttgagatagggtctcactctgttgcccagactggagtgcagtggtactatcacggctcactgcagcctcaacctcctggactcaagtggtcctcccgcctcagcctcctgagtagctgagactacaggtgtatagagatggggtctcaccatgttgcccaggctggtcttgaactcctggactcaagagatcctcccaccttagcctcccaaagtgctgggattacaggagtgagccaccacaccctgcctggtatttcaacctctttgtggctactgtaaatgggattgtgctcttgatttgactctcagccaggatattattggtgtatagaaaatactactgatttttgtatactgatttagtatcctgaaactttactaaaattgtttatcagttcttagtagccttttagcagagtctttagggttttctaggtatagaatcacatcatcggtggagagaaatagtttgacttcttctttgcctatttggatgccttttacttttttttcttgcctgattgctctggctaagactaccctttggatcttcattggtaggaattcttagtgttccaggcttaaagttcattttgtcagagaagaactgtgtttgcttctgtcatgtgtctgggaacaccaacaacttagaacagctttgaactaaattataagtattctgtttttcaagtcacacagataatgtgaattccaactccaaactcttgtgagattgggcttatggctcttaaagaagacactgtctttccctcccccgagaaccaaggccaacactggtaagtatccctatattgccctgcgggatgggtttttcctggttcactcgctgagaatgtgatctttcagtggtcctggttttatgtgggagtttccaatctaatttccctcattgttgggtctctagactttgtttcttgtctccatgtggccccaaggtctaggccacaagggattgtcagatgcttgcacggaaaccccagtttcaacacctgttcactccctctgaagctgtgtttcctcattactttgtgttttctcattgcttctggcttctgataatttttttgtactttcctgccagcacattcctacattaaattttttattttttatttatttattttttagccagcatgtactggggagtttcttcagatatctaatctgtaatattgttagacacagaagatctattgtgtgatcacacaaaaattactttcattgcttttctctctttataaaaataatatatatcctctataaagaaaaaataaaaccatgggcaatcaagatgaaaataaaaaccatttctcatcctacagcccagaagcaaccagtgaacactttggtgcctatccttccttatctatataaaatagatcctccgtatttgttattttgaaagctttttcctccacccaaactatgatgaacatattttcctggacttcactattctttaagaacatccttttaagttaccagagtgcacaggtgtgccatgatggaggtggttttgaataaaagtctgcctgactcctgagttcttactttttccattgttctgtgcgaggcatttccctctaagcattagctaaaccagagtagttaggaaccttggagaaaaagatgtttctcacagactgtttcaattccctgtgtcccactttaggcttagtgtgtctttaattgtgtgcagctgggtttatgcttgatctgtttagcctggagtttctaccgagttgtttttttttttaaaggtccttaatgggatgttgacgggtttatctcactctcctttttcgtgcctgtactgagtttgagtaagtcatcagcaagccctccatttatgtgtttttagtggagtccagatgcttcttttctgacgcagatgggagttaaacagcagacccagggccacaggaatggtcagtggccacaggaatggtcagccatgccattctctgtggacttctagttcgtcattgtaacacgtgttgggaaactctagagccttttctgctctgacattcagcaagcattttctctctctcacagagtcacaggttatcagatgggggatatctgcaggttctacactatagactatatcatctacccctgggactcttatctcaaatgagcccagctgcttgggggctttcctatgactactgtaaccacatttccttatccagaagttcagacacattctctgatggcctcggtccaaaggtaatagtcacaatgggccaactctcagaggcctgcaatgtacctgaaactgcactgtatttcacatagatcctctaatcctcataccacgcctgcaatgcaacaggctccctattttacagacagaaaaactaaagattaaagagaggagcttgcccagcatcacaacaaataggagagtcaggattggagcccgagtcccactctttccatcctgccgtactgctttttgctcttgggttttttagaacacagaaattctgagggcatgggaagaacacttagctaaatctttggcagtccccagggcttggctgaaaagtacctatcatatgtatggcaaagctggatggcactggtaaaagcagcacctgttttaaactcaaaactgggttcacatcccaactctgtcactgagatgctgtgtgacttgggcaagttcacttaactcttcagatcttctgttttcttatccttaaaatgaaggtaatacctcccttgtaaggttgttgtgaagattaggtgagattttatataaatatatacatgtaacgtatgaatatgagattacatgtatttatttttatgcacattattttttataaaatgttttaaacactcattttacacacacagatatcccataggcgcccagtggctggtataaggcagtcaccaacctctctggttctgccacgtctatacttcgtgaatctgtcagtaaaagcaaatcggatggtacaattaaaaggattaggtaaatgtaaagtattgaaagaaaatattgaggtgtatcttttcttctgtgctttgaatggagtgacatttatcttgttattttatagctgggagtttgcagggttttccagctcagctcagggataccaaatacaacgtgggttaaatatacaagccaactcagcttcatgcccgggctaagcctgtccatgaaacataaaccgcgttaattcccatattcatgacagagttctcttgggggaacagcatttggagaaaatactaacaactaaaactatttccacatttcataatgatcatccaagggacatctgcaactgtgtggctttgatacattcttttttttttttttttgagacggagtctcgctctatcgccaggctggcatgcagtggcacgatcttggctcactgcaacctccgcctcccgggttcaagccattctcctgcctcagcctcctgagtagctaggactataggcacgcaccaccacgcccagctaatttttgtatttttagtagagacagggtttcaccgtattagccagtatggtgtcaatctcttgacctcgtgatctgcccgcctcggcctccaaaagtgctgggattacaggcgtgagccaccacgcccagcccaatacattcctacatgtttaatgtgtggcccatctggagccacaccagcggattcagccctgttggagccttgagccagtccaggcccaacaatcgcctttgccctggtggtgttccttctgatttaagtctggaatcctcacacataagagaaacctcaggctctagtagctaccgaccccatcctcatggagccaggtcaatttcttccaactgggcttctgcccttgttcctggtcggtaccttgttttccacaagggagacaacctgaccaggatccctgcccgtttgactggcccctgccatgcccttgtttcctttttctaccaaggcaacaggtgttagtccccacagataaccttcgtgctatctgggtccagccgtgaataacctgagctcatgaaaccatgaggccaccagcgtctagttgccagtattgactcatgtatggacgtcgatgctccttttgccattttggacccacagatatggacacaaacaaatccaagtttgttttgtcatgttctttcactttgaaaagctcagctaactttctggattgttccccaggccctcagaacgtgctggcctatgctgtacattgctcactagtggtgatccaagttgcgggggttctctgtaatatcactggttctaatattgtaatattatatctctctgtagaagacatgaaaatgaaaaatatagaactatataggcaagagaacaaaactctcatatgtaatctcactatccagaaattatcacttttagtattttgataaatccctttccactcctcttggatgcacataatattttcacatagctgaagtcacactatacatacaattttaaaacctgattttacatttaactttttttttttttttgagacagagtcttgcttcgtcacccaggctggagtgagatggcacgaactcggctcactgcaacctccatctccagggttcaagctattctcatgcctcagcctcctgagtagctgggattacaggcacacatcatcaagcctggctaattttttgtatttttagtagagacgaggtttcaccatgttgcccaggctggccttgaactcctgagctcagacaatctgcctgtctcagcctcccaaagtgctaggattacaggcatgagccactgcacccagccatttaacattttattataagcatttttgccatatcaccaagtttacctatagacatcatctttaatgacagaatgacaatccctcaagctaacccatatttacattgtttctaatttgtcactgcttggatgaacctatttgtgcaaaaaaatctttctcataattttggattatgtctttggtgcaaattcctagaagtgaaatttctaagtcaacaagtgtgaacattttaaggcccttgatatacaatctggctttagtctatgactttgtgagttgttaaagaataaattcatagtcaccaattcaaagatttttcatctataatcttttgtttgccatgaagttaactactgagatcacaataaaatagggtgatactttttctattaatttcaacacaaatatgggcttaaaaatatttcacacaggagtatgggaaactggaagtaatgagattaggcaatattttcaaatgacctgcaatcactttcctaataacaggaaattgtcatgaagatttgtatctctaattattttttagactcttctcctcaaagctatgaatctgaatctgagtcagcagcctaaacagccagaattggaaacagtgaactctatttctgagtttcttgagtagcatgggaacttgggatgtcagctgctcagatccatttatgtaataatttttaaaaaaaaaaaaatctgtcttctccatgaaccctcccctgatccctccaggcagaatcaatcactcttccttctctgccctgctcatcaccagtgcctcatttaacacttgtctttgtctttatcccatcacagttatttgttcaagtctcccattaggatgggtgctcctggaaggcgaaacctagtgtgtttccctagacttagcacagaaaccagtgcaaaacaggcacacacaaacaggaggaggatttttttttttaatctgctagtaagcatgtgggttgtggcttgctgggaatcctatgtgtagggcaggttggaaagggaaaggggaaaggggaaggaggttcaatgccagcccagagggtgtacatgagcaataatcagaagagagtattatttctaaaatttcagtggttccaaaatgaaaagtacattgactatttcatagatatttgtggtataccttccagggagcagatattgtgccaggtgatggggtccagagaggagtaaaaagctctatctgccttcctaaagttcctggagaccaccaccacagtaaaatatagagtttttggccgggcacggtggctcatgtctgtatttccagatttcaaacagctgaccgacaaccacccgctactccctatttactttactcaataaataagaacggttctagaagctcagggcccttgttcactagaagcaaggagcctcctgacccctttttccaaatatactcttttgtctttttctttatgcccatgttcgtcctcctttgttcagtccaccagggtctgtggcaattgagtacctacattccaggcattgtgctgggaactagagacacaaattgggaggctggggtgggaggatcacctgaggtcaggggttcgagaccagcctgaccaacatggtgaaaccccttctctactaaaaatacaaaaattagccgggtgtgatggtgcatgcctgtaatctcagctacttgggaggctgaggcaggagaatagcttgaaccctggaggtggaggttgcagtgagctgaaatcatgccactgcactccagcctgggaaacaagagcaaaactctgtctcaaaaaaaaaaaaaaatagagatttcaatgatcctattaaaaagcttgtccgtggatgaaggaaaataagcaatgcaaatccagataggataagagatagagtctggatttccactaatcagagagcaccacctttaagtccattatctaaaaatcatttaagattctttcaggcaatcactgtgtgtcaaccctgctatctgccatgtctagattatctgctcactcatttccatttggtagcaaccttccaagggcaagtaaggcctttgaaatccactaaatcttactacaaatttcttgggggactgtcatatctgtggtggctcgccatgaaaaatgtattatatccaaccaagtggatatttaaaactatgttatacataattgggaaagaatagctaaggcttaaggataaagattcattaagaaaaagtgttgcatgctaaaaagttttggagtgacatggccaagataaaatcctcgttctgctggacattcatcttgtagccctgctaagttacttagcctttctggggctcagtattctcatctgtaaaatgggggtgattatagctatttcctaaagaagaagagaaggagtaggtgaacaaagaaggctatgtgggttcgacactgatgtctagcattcaaacataaagaatgtggaatgcataagaaaaaggggaagacaccttcttctggtgggtagaagactgagcaagaagcattgggtgactcagattccagtcccagatccattccaaacttgctggaaggctgagggaatcccattcccctggaacaatctcagttttcccatctgtaaaatgagcaggctggaatacatgaccccagtttcctcccagttctgacatttcatcagatccttttgttctctcttcttctaaagcatgtaagtcagttaggaccggggccaaggcagcatcataacatggctcattcaggctttcatgtctccaggttagaaggctgccagcctggtcaccaagaagaatacttttgtgaaagatcctgccacgagctggtgtttcatgagcaacgaacagaaaaccatctcccattttgacagccctgcgctgggaattcataaaatattcaagtaactaataaagtcattttttgattcagcagtggttttctctactcatctcttcatttgtttgtccatccagttgttgattcaagtcactggagcatctattatgagaacagacatgcagatgtgctgcttgtcttccaggagctattgtttcaggcctctcttcctggcttgtagatggctgtcttctccctgagtcttcacattgtcttctctctctgtgtgtctgtgtccaaatttcctctccttgtaaggactttctaaggtaattagggcctactctgttggcttcattttaacttgattacatctgtaaataccctatctccaaataaggtcatattctgagttacttggggttaggatttcaacatatgactttgtcaggggacacaattcaacccataacagttagtaaacttagtcaaccattccttcatttgctcatacattcattcattcttccattcaacccataacagttagtcaacttatttatccatcccttcatgtgttcatatgttcattcattatgccatccaatccataacggtcaacttattgatccattccttcatttattcattcattcttccaaccatatctgagtgttgggagccaaaagcctgagggttgtgaccaactcagcattccactggaggctaaatgatcaaacagcaaactgctgatcatgagtgcaggatgtgggcaaactcacatctgcacctgccgccagaaggtatgctgagggcaatcactccctgccgccgtgctccttgagattatctactggaacatctggagtctactgttctaagaaggcagtcatgcaggcctgcactaaatcaagcagctgaccaacaaccaccccctactccctatctcctttactcaataaataagaagggctctagaaactcagggcccttgttcgctagaagcaaggagccacctgacccctttttccaagtatatgcttttgtctttattcctacattcgtcctcctttgttcagtccaccagggtccatggcaaatgagtacctacattccaggcattgtgttgggaactagagacacaaagcagaacaagcagatgtatccatggaagatgttatatctggtggaggcatcatgcacacagacagctcactcagtgcaaggcaagcttaaagtgagggccgggcactcagctcccgcagagcattctgggcaggtttctaagtcttccatgaggcaatggtgttggggccaagaggtgaaagacttgggtagagctgagtgggtggcaggtaagaagagaggaatgcctgggaaaggaggaatgtctgcaaaggaaattgcaagggaagatagaagggagtgtggaaggaaagggcaccattttggaacttaaacaatgtggatggcgtctaagatgcgattttcccccataacctcgctggatcctcaaggcaataatgtaaggtatgtagggcagaaattataatttcaaaataaagataagaaaactgaggcccagaagaggataactaatttgctcacacgatacagcgttcaagtgcaaaaccagagctagagctgtggtctccctcgctttgcagacacaagggagaagagcagcaataggtgtcctggggaaaattaatctctttgggttttgcaaatgaccttgacccatctatttggattttgtgaatgaccttggtaagtctcttacactctttctctcatgaggtacttctgatatcattttgttattacttgggccaaagtatgctgcttttctgcagggagcagcatggcttcatttcaaacactgttcttcgtaacagctctttaacatttggctactagagaaaatgtccccgtattttgtgaatgctttagaaactttccagttccttcacagtttcctccgtcagctgagtgtaacagtttggaaaacagtgatgcatcattacagcgaaatcaaacaccaattttagccctttccagcagtggttttctttagaacacattcatcattaaaacaaaggggatgtgggtttgtagggaaagtgacattcgagctgtcaagacaatcgaaaatgtttaggaaaacatgtctcttttttaggtaatacttgctttttgggcaagtgcaatttcaaaaaaaattctttcctgtaaatgaacattgttaagataacataggaaagagcctggaaatccttgattgtctcaagtataatcattgttttgactaataagtcaactttgcaataacaaaaaggcaagtaaccaaatttaactatgtggtttgcatttgtttgtatttttaaagtgtaaatcctgagttttgttaaataagagagccaggaatagtcatagagatttttttaatgtgggggaaactggtttttcaacattggtaaaggttctaattggtatatgactctttttaacaataataatgatggtcacatactatatttgaataaactctgagactttataaagttcttccatccctgttatgccccctggttctcagaatagccctacaagtggccaggtgcagtggctcatgccagccctttgggaggctgaggtgggcagatcacttgaggtcaggagttcgagaccagcctggccaacacagcaaaattctgtctctactgaaaatacaaaaaattagccaggcatggtggcgggcgtctgtaatcccagctactctggaggctgaggctggagaatcgcttgaacccaggacgtggaggttgcagtaagccaagattgtgccactgcactccagcctgggaaacagagtgagactccatctcaggagaaaaaaaaaattgacccagcaatcccattactgggtatataccctaaggattataagtaattctactataaagacatatgcacatgtatgtttattgcaacactattcacaatagcaaagacttgaaaccaacccaaatgcccatcaatgttagactggataaagaaaatgtggcacatatataccatggaatactatgaagccataaaaaagaattagttcatgtcctttgcagggacatggatgaagctggaaaccatcattctcagcaaactaacacaggaacaaaaaaccaaacaccacgtgttctcacgggtgggagttgaacaatgagaacacatggacacggaggggaacatcacacaccggggtctgttgtgggggtggggaactaggggaggaatagcattaggagaaatacctaatgtagatgatgggttgatgggtgcagcaaatcaccatggcacatgtatacctatgtaacaaacctgcaccttctacacatgtatcccagaacttaaagtataataaaaaaaaattttaaaaaaaagaataaccctttgagggaagcagcatacaggtgatcaccccactgtatggatagggcattggagcattaacaaatatttgcaagcttctactatgtaagaagccctggcctgggcattccaagctgaattggacacagtgctcctgctcttagggaacttacatgaatttttaggcaggtagacagagcagggcctatgacccaggggcctgggccgctcatctactgtactgctagatccaactcaaatctgcagctctgttaagggtaacggtggaatttccttttggaagagacgccttctggtatggaggccatgtggtgcctgccaggcctctgtggtcaacctgaggaaacatccagaacacttcaaacccgggtccccgaggatgcacaagcacatcaggagatcttccacccttaccttcccccccgcccccgtccagcaataccacgctgcttatgatcccccagatatgaaatgctctctgtgtctctcccttcacataagctcccccttctgctcggaatgcccctctctgccccacagtccatgcaggcgtcgtgtgtcaccaaaacctagcacagaggacaccactcccttgcctgagtcccttctataccttatatacacatccactgttgaacttgtcaccccctaaattgtgtctgtctcaataccctattggatctgggagcatcttgagagtggaggctgtcttttgtgacattctagatcctcagtggctagtccagaatctggcacagggcagatattcaacacatacatgatatcaagaatttagtaagcacttagaatgtgatgagtttgaggcagtctctaagtgtgtgatctctaagccccataaagatccttgggaaaggcattcttttcctcattttacgtatgaggaacatgagatttagagaaattaagagacttggccaatatcagagtcaagaaaaaaaaaaagcactaggattcaaagccaggcttatctgatttcaacaatctttccacaaacccacagtgactctgctgaattgccttcaaggtagttcctcctgcaaagtttggtaaagactgcagtgaactctggctgctgtactctttctccagtcaccctgctccaccctagacaaggggaagcaagaagttttgggtttagaagtctcccgatgatttcttatccatgactccctttttgtttgttttatcataagagcattttccacagcactaatctggatgacaagactgtaagcaccttgcccttagtcatcttgacttagagtcttttttttaattcatctgactgcttctgaaaatggtcaaagtccaaatcttactgacgctaattatttctttaaaatgtgcggatctgtccattggcaaaaagaagaccaggaggcaaagttaaattacatagtacatcactgtccccagcacagtcttctctgccactctgtcagtgtgaaaatttacagctgatattatctctttgaaggggctcaagtcttagaaaatacaagcaaattttaagtagaattttaattttaatgaaagcttcagggaatgctgtttatgttgcttatctttcatacctggtgattaagttactttatgcttaatggaaaaggatatttctaatccccagacaggctcaacatctgtctaggactgtgtttttggaagctttaagctgcttgtgatggatgtaataaaaccaggacactactgaactgacacctgaaggctatgcataaggaagaccagggacattatgtctctgcccagtgcttgtattgaaatcaaatcaacatctcatgcatttcattctgtcagcctttaaaatcctgcctcatgctctttcatggtattccctggacagggctgcggaaatgaaggtgggttgtgaggtgggatctggctttcacactcagtgaaaactagcagttcttcagcccctgtgacatctacaggccagggttctgctagatgccctttatcactatctcgtttaactcttacagtaattctgaaggcagcaattaccatccccactttccactcggagaaactaaggctcaaagaggtgaacttgcttatcaggtgacacagctcggaagctaggatttgatcctaagacagcctgctcttgttctatcccccatagtatatgaaggagttgacaagctatggcccttgggtcaaaccaatttgcaatctgttcgtgtaaataaagttttattggaacacaggcacagctatttgttaatatatcgtctacagccaatgtcacgcagcaacagtagaactgaatagatgtggcagagatagcctggcaggcagagcctaagctagttcctatcaaccttttacagggaagtttgccctctccaggcatagggcctataccataataaggaaatgacctgagcacctattacctgggaggcctgggttgggccagggcatggaatgacggttgatgaagatacagtccacagtttcaaggagcttaaaatctgtaggcagggccttctaatgaaatggtaagcccagatgttatctatctcagcagcccccaagctgcccagtaaaagagacagtgctgccctgctctcaccctccatatagatcactcaggccttcctgggcgtctccatgaagagcctcaagagcacccagcacatcctcacgcagcccactcctatgtcatgcggccccctccatcctcattggaccactcctgcctgcgctcctgcagagtcgcagatgccccatttcccctgcacaccacggtgctggggagtgctgcttgggagcaccatgccacagcaagagggctggctcttcctgctccctaggctatctgggaatggagccagatcccatagagaaggagagaggactagagtcaggaacctgtgtcactgtgctcctggggtcctgcttgtgccaagtgtggcccaggtcctctcacccagacctatcagctctgcctctaacccgctctccacaggggctcaaaaccagtgctagggacccaggtcaggaacatatgccatttcatctcgatttcctctgcctcctgttgctctttctgtgacggaaacctctctcctcacagaacagacagtcactggcagtggtggtgggagggggagctggccaaggattccacactagtgaccactggacataaaactgggtatttacccatcatagcaacatgaaaaaagtaaacaaaggtgtgtgtgtgtgcatgtgcatgcatgtgtaattgtgtgaatgtatcactcttccatgaaatcatgctcacaggactacattaaaccatacgaaatagcagatattgggctattttgacatacgaaagtgccattttggagtgcatatactagtgctgtgcttgtatacagctgttacaagaacatgtgcacatttgccagcagacaggacacctcccaaagttagttccgctttcttctgacttcccgatacatctcatgtttgcttattctgacacccatcacatcgtattctaattgcttagatagatgcctgtccttcctaaaatactagaagtttctttcttgaatcagaaacttttgtgctattttaaaatatctttgcctacctggtatttcccagctcaatatatctttgttgaataaatatgtactgtttgtgtgtgtaaaagaacaaaaaaattgctattttcacatgcttcaagcctaataattagtacttgatttttttaaaaggatccttacagagaaaaataaaatgttggctactttatgttatcttcacaatttgggtttctttttcgtttacattttattggcttataaagtctggacatctggaaattacttatcttatacaagcagcagttggcccccaaacattctcataaaatttggcagtagctatcaaaatttaaaatcacctatttcttgacccagcaattttatttctaagggtccatcctgaagaaatattggcatgtatagacaaagacacacacatacacacacacacacacacacacacacacacacacacacacacactgagggggttcctggcaatgttgtttgaaatgtgaaaaagtagaaataacttaagtcctcatcatcagaggattaattataaaaagaatgaaaatgccccaaactggtatagcacacaggccatagaaacaatgatgtccggatctgtatctactgacatggaaagatgtccttactgtactgataagtaaaaatagcaagtcatagcatgtcatatgcatgaatcatacatagtgtgatcctgtttttgtaaaaattactacaacataataaatttgtctctctttacaggtttcagtatcactaagaagggttagaaggattgaaagcaaattgtttatagtggttgtcgctgggaagtgaggctggggttgagggataagctgagggaagatttgcctttcaatctatagactttagaaattgtttgaattatttacaaggaagatgtatactatttttataattttaaaaacaaagcaataaagaaaaaaaagccttgatacacagtggcgatttgtgcaaaccagaataaaacagaatacagaaaaaggaaaaattcattttgattctggggttctgggaaggctttcagaggaagcactttctgagttggcctttaaaagatgatcagaaataacggaacgatggtatccagcttgaaggaatcatgagcacatgtcaggctcgaggacagctacccacattagagtgtgatttgtagttgatgacagtcaagagggttgaaaattttgttatgaaacttgatctccagttaagatttttattactttattcagacaaacctaatttctccccaggtagatgtctcttacttggaactcagctgcctaggtatttgagggctggggagctgttgcagacacaattaaaggcccatccaagaccccgtcccatttcctaacatattacattctgtttaggtagccatgctcttcctaaaagccacatgcttcagaagaggctgaccccagtccaaggccctgccaggggtatattctgactggtctaagccagttgtgatgggcccatcccccttgacaatactggtttatgtttagggctttgacccaattctggctaatgcgatgtgatgttatgtatattttaccataataaaagtagagggtggctgcacatggtggctcatgcctataatcccagtgcttttgagaggccgaggtaagaggattgcttgaggccagaagttcgagaccgcctaggcaatatagcaagatcttatctctataaaaaaaaaaaatgaaaaaaattagccaggcagtgcatacctgtattcctaattacttagaaggctgaggcctgaggatcacttgagccccagagttcaaggttgtagtgagctatgattgcaccactgcactttagcctgcctgggtgacagagcaagacactgttgaaagaaagaaaagaaaaggaaagaaaagaaaagaaggagagagagaaagaaaggaaggaaggaaggaaggaagaaaaagaaaaagaaagaaagaaagaaagaaaggaaggaaaagaagagagggaaagaaggaagggagggagggaaggggagggaagggagggaagggagggaaggaagggaaggaaagaaaggaagaaaggaagtgaagaaaggaaggaaggaaagaagaaagaaagaaagaaagagaaaagcaactgacagcacccagtggcgcaagcataaattgtgagtataatctctaaatcttacatttaaattcttacattgctccataggaaataaattgcacttaaaaatccactagaattaagttaagcccatataatgaaataaaatggggtcattgaaaataaaagcatgtgattccactttaggccatgagagagtgacagcaaacttatactcttgccctaaataactataaaaagtaggcattttttttttttgaggccagtgtttttaagcactggacaactggcagtgcagccctgtgagccttgcaaaaagggaaacatgaggtgggcctcggtttacccagccttcagcctgtggtcactttacagaccacggaccagggtgtggggtgtatcagatttgctgagctgctggaattcatggagcaggttactggagaggaatcagtctgtggatgggttggggagactctccacatctttggcagagggctgggccatgaatgtgcagagtgagactctgtgaggcctaacggagaggctgctacagggtagagcattgaccagagaaaccagaagtcacagagtgatgggaaatgtcagagtgaaggtggggagatttcgatgccactggaacatgtgtcccaagagggtagcaactgccatctgttgtcatgcctgatgtacccccagactccaaaatgatgccattcccataggagatgtgtaatgcttatttaaatggtgtcacctaagctgggtctagggcagatggcattaaggacaaggtaggggctgtccaaggagttcagattggggagggatctggctccagggactgcagggccaaggcacttaggagtggggaggcatcattagagataaatttaaaaatgcattcattcatccatttcacttcatttcttctctgacccatcttgctaccacaaagaacatgaaataataaccaaacactggaaataacccatgtcatcaatcacagaatgtagaaataaactgtgggaatattcacaagatgtaattccacacaacaatgaaaatgaatgaacttctgctaaacccaacaacacagatgaatgtcactaacaagtgttgagtgagggaagccagatacaaaacagtacatacagtatggcagcattaatatgtaaagttcaaaaacacgccaagtaacagatgaggttagaaaccagtatgatggttacccgtggggctagtggagagggtatgtgcaaggcttctggggtcctggtaatgttctatttcttgtccttgattgggttaccccagtatgttcattctatgacaacacactgagcagtgctcttatgaattatgcactatgaatagaaagtgtcaacaaaaaggtaaatgtccacctgacatattttacaagatcagaagctaggctaaatgatggggataatgggggctcatttaattaattatacatttcagaaagtccatttttgtatatttcaataaaatcattattaaataactttaaagatggcaatataacttcaggaggtttatccctttcaaatacttgagaatatggattttaaaaagaaacacatacatgctgtttaaaaaaaggatgtgaagtggcttacacagataggtagacatagataaaatgccttaaaatgaacatggaaataggaggaaaggaagagcaagggtagaataaaaacagaaggttaaagacaaacacaaagaggcataacgcttcaagggcctgcacagttgttgcggaggtcctgagagtgagggcacaaatatggctgcaggcttcctggtagccaaaggaaagaaggaaagagaacagttcaaagattcgctttgtccacagatgttgtaatatggaagacagttgctcagaagtccagcttgtcctgcaagtggggcccaagagaaatttcccctgtggggagacagtgagtaatacagagcatgaggtccacaagaatatcctaagccaggtacagcagctcatgcttgtaatcccagcatcttgggagtctgagagggaaggatcacttgaggccaggagttcaaaaccagcctgggcaacatagtgagaccctcatctctaaaaaaaaaaaaaaaaaaaaaaaggaaatatcctaatattaacactaacagtgatgacaatgttaacaataatagctaacactttaatactgtttaactttgtgccaagcacggtttgaagttctttgcatgcattatagtaaatttaaaatcaatgttttttaggctgagtgtggtggctcatgcctgtaatcctagcactcaagcactttgggagactgaggtgggcagattgcttgagctcaggtattcaagaccagcctgggcaacatggcaaaacaccatctccaaaaaaaatacaaaacatttgccaggtgtggtggcgcatgcctatagtcccagctactcaggaggctaaggtgggagaatcacctgaggctgggaggtcgaggctgcagtgagccaagattgcacgactgcactccagcctggtgacaaggtgagactctgtttaaaaaaaatttttttttataaattcaatgtttctggtaatgtctcccattgcagggtagcacaaaagcagagccaggaaaggcagctggaacaatggtatcaaggagcaaagctctctgatggtttggcttgatccaatgatctaaaccagatgagctccatatctctctggtaaacgatgaaggacgtcactaggcagcaaatcatcgggaagcaaatagcccatcttgcacatttagacctagtctattttctttgacagataatcaaaccaaaggtaaggttgacatccttttctaaagtgaggtacctaataagcttcgtacctgaagagatggccacctcatctctacaggagtgggccaaggtaggatctgtgggcaaggccaagattcacctctggaaactgttctatgtctgctctaacacaaggacaattggataagactctatcccctgagtttataccaccaaatatggccatgatcatttcagtcttgtgaagaccatgaagacgagcagcctcccttgcagggaaggaattgttctcaaagagggaggagcatccttacccactacagagggcctaggaccgctttgcctggggaaggtaagaagagagagcgtctagctaatgcacaacaacctggaataatacatcctcatgcttttgagttattttgacttctgccaacaagtttctaacaatcttaaagttaactcataaacttaatctttgttaacagatggatttatccaaggatgaattaagagaggtgaattttttagtcattcattcattcaaatatttactgaccaatcaaagaggaagacaccagtggaaaaccctcactggtggtatgcaaaagacgtccgtcagatcacacatctgtccttcagggaattgagtctaattcactggttttactagccagttccttctttccttgactcgacaaacatgagtttcatgcctgttttgtgccaagaagtattcatatcacaaggccagtaggcagagatacaagtaatgtcctgaaggtgcttagattaaggagcaattaacccagtggaggcaggggggtgaacagagcttcaaggaagaggggacagcagagcccaactcccgagaatcatgagatttgttttataaaaaaaactcgccacaggattcctctaagtaacaattttttttcctagtgcctttcaattatgcctggactgatttacacaccctttcagaagcacagctgttgtgtaaattaaacctcagtaatccctccccagtgctgagtcccccttaggagaaattctggcacctgctgatttatttctgtgtactttctcagcaccttgaggatttcagctttagtaatcacaagttatgagtcactccaattggggatagttagacaaagagggagcaggggattgaaaatagagaatggaagcaaagcagatggtggagaagggtagagaggcctgcaaggaagccttgggctagatagagggaagtaatcctaagctttagatgttcacagccgcctcctcaggtagaaggaagaagagctgggaaatgaaaaaaagaggctgatggtctgccctgaagaacccttctctgagcccacggaggaacccgggaagcctgacacagtcacagactgaaaacttttcatctgtgcttcaaggatcatgagataacatcttcaaggagcttagcacacaacctggcgactggtcagcactttctaactgccagctgctgctgctgctgctgttgttcctcaacttcaactcctcagtccaggggaaatttcaggacaaacccgttaggttgaaccagccaaggagggacaactctatctctacccagaaccatatactgataatccctaggaaacttctttagaccataagaatgtcgcccttgtctgtttacattttattgatactctttttaaaagatttaatataagtatgttgttgtcccatgatttccctttctgtgtgtgcatctatacttatcatctgtggccctggtgccaagtcatcacctcaggtgtcaatgttgaatttttaatgttgcatttctcattagagtctctgaaggaattcttggggtccgggaatgctcaagtttgtgaattgctacattagactgataactaccttgagagcaagctgaccttgggccagaggagacataaaacacccagtgacactctagtgcccctagaattagtagaaagatcgcatttgctaaccacaagtgtgagactcacaaagggtaaaatggatttttttctcacttggaagaaatgactccaattctggaaatcctatagcagcccctgctgtcaccatgataatgagagagtatgttagagccccaagcaggccccgtaacctagtcatgtccaaaaagcttttattttagcgcaaagggtcaatatctattcagtgtgtgtgtgtgtgtgtgtgtgtgtgcatgcacatgtgtatatcaaacctcaaaatcccaaaggttaagtggacaagggatataaacagataatttcccagtactataaaatgaaacataaatagtaaatacaaacagttatatggaaacacggccaccctcattaacaaccaaagacatgcacatttcaaaaccaccttacacatgctaagttagcacttacttttagaaagtcaacacctaatgctttgcaggtgaaggggcacgcatgggcattaaaggtggcaaaggcaacaattataactcaccctttgggttaaagcaaaatgggactttgcatgaggatcttcagagatattcattccctttagccctgtgattctagagctgggttttatttaaagaagaacaaaattgagtaccacataaatgtctgattacggggataaattatggtacaactgcaccctaggatgttctctattcactaagatgattatgaggattgcatagcaatgtgcggaaaagtttatgccataatatcatccaaaagccggtagaactcgaatagcttgtacgttacaagaaaacattaaagctacatctgcaggtggacagggtctagaagagcttaaaattgctggtagaagttagggttggagtatttttttccatttttttcaattttgtttttaacataaccattgtaatttttgaaaataccttactgttgtttgttccaaaactgcaaaaagacccctttaaaatcaagtgaaatcagtgcttatgaagacaacctctgagccaggcattgttccaggtgctttaaaaaccatattcatcttttaatgtacctcattttacaggtaaagaagttggggtttggtaagagtaagtggcttgctctgctcatagaggctgacagaagttatgaagtttccagccttggtcagtctggctcaagcctgagctttccttccaacatcacactgactctctttcgctcccaggaaagtgatactctggttttcatcctcaactgaaagaattcattttttttaactgcatttgcttttgtgctagagaagtgatatggtttggctgtgtccccacccaaatttcatcttgagttgtagctcccataattcccgtatgttatgggagggacccagtgggagataattgaatcatggctgccatatcttatgagacttattaaggggaaaacccttttgcttggctctcattctctcttgcctgctgacatgtaagacgtgccttccaccatgattgtgaggcttccccagccacgtggaactgtgattccatgaaacctctttttctttataaattacccagtctcaggtatgtctttatcagcagcacgaaaacggactaatataagaagtaattggctttctggaaagccttcccagacaccctcaagtggagttaaccgctgcctctttcatgctttcagtactcagtacagtgcatggcccattgtaggtgctcggcgtgtagtgacgccgttgaatgtgaggctaggatgtttccttcccatctgagtgccacatccccagcactgtggcagtgatcccttaacagcaggggagggcagagaaaagaggcaagggccacagccctggctgactcccatttcctgagttctgtatgctgcctaatgttatttgttagttggtttgttctcatcacaacgtagctgaaaagggttaggagatattgagaacaatcctttcagaggaagatgaaaaagacttggccaagcaagatcggggaaggagcagatgagagttctggagaaaaagaaaagaagctggaggacagaggagaagatgacaggtggagagacaagctttgggagtgccctaatgaaaaggcaggggtcacagtgaaaacgggcacttccagaaagaggaaagaaaaaaaaaacaggcccaggcaatttcttgcagaaatacctgtggggataacaagcacttttttttttttttttaacctgagcaaaaatcgtcaagcccagctacttttatcatctaaaattcgttctggagatttcctccagcttgtgagagacatcttaactctccctgaaatagtcatttgtcacaaggggctggaagtgagccaaaatgtctgtaagcaaagtccaggagctctgtataataaaacaaattgcaaaatattgattttgtttcttttcgacctgttttaatccaacaatatcatcttattatgagaatttcctctcctgatggcgaggagaacaggctcagctgtgggagaggaagaagcagacacaggcttcacttctcctctgaaaggctctgtttagggatctctaatgtcaccggcagaattgcagttccaatcttctaccatgatatttctgaaggaaagaccaaagtgctggagaacctgacaaacaggatgtgtgcttttctcctaaacttagaaaaaagtagaaataagaacccagagaaagtgaccaaatgtcactcagatgctactaacacctcttgtgggcccctcagagcccaggagatgagtcccaggctcccaggctaggtgggctcccagatagggtgggcgaggcctcccgctgccgggcctccatccatctcgccagccttccagctgcgcccgcccaccccaccccgggaccatcctcccctccgttttctggacacatcaggcctgttcatggctccaggcctttgctcatgtcccttctgcctgggaggccctctctcctcttcctcaaatgagcattgactcattcttcaaattcatggctttcctcctcagcaaagccctccagaccctcccaggaagggtgagagacctccttaggtttcccttaggttcccatgccaaggctctccacaggctcccgcagctgtctcctggctggactgcaagtcagcagcaggggctggtctctgaatctctctgtgtccagagcctagtccagagcctggaacggcacttaggatgggtttgtggagtgaatgaatgaatggcagtgccctgctcccctcctccaccctcaccctttgtttaagaacatcacccattcaggggtgagagcctggcatccaggcctctaatctcaggatgaaaggcacaggcctgctctttagaacataaagcattcatctttccttcccacttttcttgtgccacgggagctctgaaaatcctgccatatcaatgtcttccaggttctgtgttcctctcaaaaagataccagtttacgcgtgtgaaggctcgcaggttattgagtctctcgaggggttttttaatctttgcaggcagaagaggatcctgacacacactttgaagtttgccttcacacgcttctgccaggaaggagccgtggtgtttcagatgtgagcagtctctgcttcagaggggcccggggctggggtgcacagccagaactggccctgggggaccctgcgctgcccacagaccatttccagcatgccaggggtcagggcaaaggattgccacgcgctctaaaactcttgctgttatccacacgctctccctccaggtccgcgggtccctgctgacccaggctttgtttagaatccaaaaataactccccccttcttgtgttcactgccacaaggcttgctaaggagtcattcacattcattaatccttttcattctcagaacaacccgatgatgggcacagtggctgggtgccaggcgctgggctgaggacggcacagccctggaggtggtgctcttcctggccctgtggcatagacgaggatcctgaggctggggaggacagcagcttgtgcccagtctcggagctgcttaggggcagagtggggcttcggggccaaggctccatcaacaaggccgtctcctctctcccgtgtcactttgagtggttcttcctcctcgaggctggagcaggaactttggcacgagccaggcctggctttggatccaagcaattcagctgtattttggcacactgcttgtcttcacccactctggctgttaaaacagaaaatcatagctggggtggcacagaaacaatagaaatgtatttcccgtggtttggaggctggaagtccgagctcacagggccagcatggttggttctgacaaggatcctcttgcaaatgcagacagccgacttctcatgagagcctcgcacggtggaaagagggtgaaggagctctcgggccccttttataaaggcatgaatcccattcatgaggttccacccccatgacctaatcacctcccaaaggccctaactcctaagaccatcacatggtggggctggccggtggagttaggatttcaacatatgtatttggaggaacacaaacatttggtttatagcatagcgttgcttcatgtctctatgcttctctcctcacctgtcaaagggacaaaataacagtagcactgttgtaaaaatgaattgaagtagagcttacaatgctctcagcacagcatctgacacatagcgcatgcgctgtctgtatctatgtagatagatggatagagaagtatttttataaccattaccctctctctaagcttttcagttcctccgggaatttgatcttcatggttactatttttttgttcaacaaaatcagcaccatgatcctctataaacaccctctccctgaactatgatccagctttttggatcagtcaatcctgctacatgtcaagcactctcaggtaaaggaatctagagatacatgataacctattttcctggcccccagggaggtgaaaagaaatatgtaaactgctcattttgaaataaaatagtaaatatcacaagagcacagaaggtggcatttttttttttttttttttgaaggtgggagaaggcagagaagacttctgaggggatatcattctggccaggatggtgacagaggactaggagttagcgaggcaaagaagggcctaaggagtgctctgaatagagtgaagagctgctggagtgctgggttattaatttccatttattcagtatcatagcacagatcactggcaggcaggagacagtggcagatggttttagtaaggtggaaaaacctagtcatgaaggatcttgtacatcacatgttatttggtttggatcttaccttagaggccaataaatctcaaatgttgatgtgcttcagaagtcagcataggagcttgttaagatgctattcccaaccctgagacttggatattatggaacatgcagccaggtggtttcaatggaggtgctccaggagccacaatcataaagtatctcagtagatgatggagaagcgtgggaggggcagtaccagagggggctacgggacgcatggccatgcctgtgattcgataaaatcaagaattctgtttcagaaccacctgtcaatcagctcctccttggtaagaggtactacttctagaaaatgtgatgtcacttctatttgttcatttatttcaacagctttattgggatgtaattgttatattaaaaactgcacctatttagtgtatacaagctgatgggtctgtacatgtacacataaccatgaaaccatcactacaatcaaggtaaaacacatatccatcacctctaaaagtttcctcctgcccctttgagttattttgtttgttttggattttttttttttttttttgagatagaatctcactcttttgctaggctgcagtgcagtggcgtgttctcggttcactgcaatctccacctcctgggttcaagcgattcccctgcctcagcctcccaagtagctagcactacaggtgcgcacgaccacacccagctaattttttgtattttagtagagacagggttgcaccatgttggccaggatgttcttgatttcctgacctcatggtctgcccacctcagcctcccaaagtgctgggattataggcttgagccaccgcacccggcctgtttctttttttcaatgaaatggggtcttgctatgtttcccaggctggtcttgaactcctgggctcaagtgatcctcccaccttggcctcccaagtagctgagactacaagtgtgagctaccacaccccctttgagtttgtaaaaatgctattcatttacagtcatgatagattattttaaaaacttttataaaattttatgtacacacacaacatacatttgccacactagtataaaatgaatcctctcttctcatttgaataaaaaacaatctttagcctatcagagacaacctttgtgattttacgtagatcatgtagtttcagacaacatcaaccatcaaaacatggtcttcaaatgtaaagagagccccaaaggcccccaaaccacacaaactttccataaaagttacacattttggccgggcgcggtggcttatgcctgtaatcccagcactttgggaggctgagacaggcagatcacaaggtcaggagttcaagaccagcctgaccaacatggtgaaaccctgtctctactaaaaatacaaaaattagctgggtgtggtggcgcacacctgtaatcccagctactcaggaggctgaggcaggaaaatcacttgaacccaggaggcagaggttgcagtgagccgagatcacaccatagcactccagcctgggcaacagagcgagaccccgtctcaaaaaaaaaaaaagttacatattttattttaggagagccagaggcatttgcagcttctctctcagtcaaggaatatgtatgaaaaacgggatggggaagggtggccatgacattaaaattagacacaaacggagcatgctgaggccatttgcaggggacacaagtcattcatttgttccttatagttttttgtgctcactctgtgcaggggtcttgtgctgagtgcagagatgacacaaggcaaggccttaaggacaaaaagttgttataacacaataaacaagaagaaagcacacttgacagggaggcataaggcaggttccgaggaccggccctctgcccctctccagctgtgtgaccccagacaggccactttgctcctttgggtgtttgtagaataagaggtgagtgacagttcctcttagcaacaaggtcctatgctttgatgttcggaaggaagaaccaaactcaccaataattaatattaactgctgctaagaagacaaatatgtgtaagcattttaagagttcaaattttaagtggctacaattaaattttggtgattaatggaacaaatgcctgtcatttgaaaagaattcacttaaaggaaatattgcattccccaaagactctcccgaaatttgagagctagaagagttccttaaagatgacccaatcaacttccaccatctgaggaaactgatgttcaggaaaaccaagtctgaccagacaataggtaagtggcaaaagagaactgggccaggttcctggctgcatcggaaaaagactccctgtcataccgtgttgctgtgatttgtaaattatggggtaaaacatgcagtatcagtaactgggctcaaggagagagaaaaaggccttcaattcttcaaagcacttggcctctatttgagctcttttactcaaatagtttgaagccttaagggagtagccccaaatcatttgcctggggaaagtatagatacaaattggttcattttctcagttacacaaatagtgaaaccgtgacccacatcttaagacatgccatcacatgaccaagtctaatggctggtgaagaattaaactcaatcccacagcaatcagcacctgagaatgctcgtcctcccagattacctgctgcagacagaagaaatggctcacccggggccagccagccagccggcagtggcagcgtcctgggccaaggatgagaaggaccagagctcctgactccctaggtggctgctgtcccaggtctgccacgccatcaggtggtcctggtggtcactgcaccactctatgtgtggacctttgcatctctaagatggagctgatacactgtccacgcctcacagggcagttgtgaggatatgtgttttaatgcaaatttcctcgcgctgagtttggcacttaataggtgcctacttattaatgtttttagtcaacagtagttattaaggttgtaagtatcacaatttcacactgccctccttcctggtaactgaatttgtactcagctggctgtacacagtgaggagatgggatgtgctcaagcaggaagcacagccagtggcttggaatccatttaattactcgtttcactttattctaccattaactggtaacatggcaaggttcaaagacctaatgattagtatgagctctccctgctcagtcaggccagctatctccctgctccacctggctcagccattcactgggaaattgcctgagtggcacctgtcccatttgtcaaacaccgaagcgctgggtaatgatctaacgtgcttggggcagagagcacatgctaatggcaccaggccaccctacgtcctcagagccccttgtgggcatgcagacctctctcagttagaagatggaggaagctaagtggctgcaaggttaaaattagctgcgcagtgactagacttcttgttggagcagaagtaatatgttctccagtttctttctcccacaacgtctcacccctgcctttctgaactataagaaatattcaaaaggccaggcgtggtggcttacacctgtaatcccagcactttgggaagccaaggcaggtggatcacttcaggtcagaagttcgagaccagcctgatcaacatggtaaaaccctgtttctactatttaaaaaaaaaaaaaaaaaaaaagaaaagaaaagaaagaaatattcaagccccatttcagatggaactaaaatgcccatgaactatttaaatgccttaatccctcagagcatgctgagaacagggcttgtggaacaatagagggctctctgagggccctgtcccagcagactagcctcctgacaccctgggttgcctgcctgctttccagaggaagccactggtccctctgcactctcagcagagaaatattgatgccaactgtggctcctctcgccccatcttccttcatgcctttctcaatgatgtcagcacactgatttctctcctctctctgaattcttgcagtgcttagcgttggacctcataattcagacttgataataaagaatctctttcaggaagtcctccccaggttcttcaatcagatattgtcaccatttccaacctgacccacttctgccccatagcctcagcgcaccttgttctatccttacctgcatccaatgtcctacatagcaagctttgggctgcatattctatttatctccattacgagcctatgagttcttgagagttgacctttaacactcttctcctttgtctctgccacatcccaggatgcagcaagaagcctgacctaggctggacatttacacacacatacatgtatactatacataaaaaatgaatattctgtattgtacctaaggttttggtagatttaaatatttcgtttctaagaacactgtattctttgttggagacacaggctgtgttttctcctgcacctgcatccttccttggtaccaggcaccacctgagtacataacaggttctcaggatgtgtttggattacagagtcttacgagtaggatgagctttcacaaacatccagcccattcacttcataaatgggaaaactagatccagggaggaaaagagactcatccacaatcattagcagccagtggaagcgccattccccacctcctcagctgacagcatggagagcccatgctattacaaaggctttcttaacagttcaaaaagaaaatcttgtcaaacctttcatagtagtacggcaggctgatagatctagataacccacttttttttcaaaggaaaatcaaataataaggctaattcccagtgatcctgaggatcagtaaggtctgagtttatacttcaagaggatggagctccgagaaaagatgatgtaccattaaaatggcaagtatggcagatgcgaaaaataagcacacatctcagcgatttccaactacaagagacaggaaaatctgtctcattaatgacaaaatgcagatgcttttcttcctgagcaggaaaaaaccacagactaaattacatccgagcctgtaaagaggtatgtgagaacccacttaaaaatgtatgatgtctcacggaaaagattgatcaactggctccctgagcatcgaaaatgtcggttagtttttcctctctcttgtttcagacaagtggtgattaatataacacggcggacagtagaggaggtgaaacttgtaaaataggtacaaaggggaaatgatcaaggagggagataatgagaatttaaatctgaaggtagagaacatgtatgaaatatattaatatggagcctacggaagggagaaaatgcgagtgggtaccatagatgccgggaaagagaacgctctcccgggctgtgacggtaagagcgaggagaggtgaattacagagtagtggagaatggggagcaaacgggttttcagcacaagaaactacatgtgccaaggccttggggcagaagagagtcaggctggagtaactgatggagtaatggaaagacggtagtttgagggagttttgggaacattaggagtgatgtgagatgggttagaaatccggacctctgtctagtgtggagatcagtggtgttcaaaggttttggtcttaagagtcctttatactctcactatccatcgatttccaaaacagaaatgaaggcaggaaaaatattcactcatttaaaaacaacaataataaatccattatgtgttaatgcaaataatgtatttctgtgggaaattattttctccaaaacaacaaaaaaagttaaaaaaaagaacattacattttttgcaaatgtctttaatgtctggcttaataagacatagttggattttcatgttggtttctacatttggtctgctgtgatatgttggggagtgaagtatatgaagaaaatcaggcatgatcaaatctggtcaagcaatgctttcttaaaggttagttagttgcaatatggaagctgaaaccatgtcaataaacttttcatactctgttacatttaaatccattggtccagccgggcgctgtggctcacgcctgtaatcccagcactttgggaggccgagactggcggatcacctgagatcaggagtttgagaccagcctaaccaacatagagcaaccctgtctctactaaaaatacaaaattagctgtgcgtggtgtcacatgcctacatgtaatcccagctacttgggaggctgaggcaggagaattgcttgaacccgggaggtggaggttatggtgagccgagattgcaccattgaaccccagcctgggcaacaagagcaaaactccatctcaaaaataaataaataaataaataaataaataaatccattcgtccatcttgcgctttggatcttttacccatgccaaactatataacgtcatacctgcaacacttggaaaatactgatttatatagctcttccgaatgttgtgcatttcattatatgacatcagaaaatcacattcattaatatcaccaactgatttcaacagaaaagtctttaaatatcgtgaagctgtcaagctcatggcggcagataggagttttcagagattccagtttttgcttaaacgttcaaattttataattggtgcaaatgttgttggctgttttcctcgaagtgaaaagctcacttagtttcaggaacatgtctacaaatgtccaaacctgaacaacttatagtttgtctgccaattgttctttccatgaaaaacattctgattgtttcaagacaaaaggggctcactcagcttgcaacccaaacagtccctacagccttactgcgcttcggtgggcagcagaagtgctttagcctacttgccattttatcatccagaatattaaaaagaagcgtgttcaagggctgagatttaatttaaaaaaaggttttttactgtttcatcaaagaccttcttaagtgaatctggcattttgtttgtttgttttaaactttgaagtatgtggcagtgatgaataatgactactagtccacctcagtgcccctgtctttttttgtttgcttgttttttgagactaagtctagctctgtcacccaggctgcagtgcaatggcgcaatctcggctcactgcaacctccacctcctgggttcaagtgattcttctgcctcggcctcctgagtagctgggattacaggcatgcaccaccatgcccggctattttttttttgtatttttagtagagacagggtttcaccatgttgcccaggctggtcttgaactcctgacctcttgatccgcccgcctcggcctcccaaagtgctgggattacaagcgtgagccaccacacccggtctcctgtcttaagtagtaataagcagccagcagttttactcatcactgcttttacagcatcactgcaaaagtcaatacaagaacaaggcaaaggatgccttatcattattatgatgacaatacttttgactccatagatatcctgacaagatatcagggaaccttgaatgttcaaggaccccacttatagaactgctggtctagtctagatcagacaaggccttgtcaggcatttaaaatttttaaaaaattttatctttctcctgtggggaaatgaaaagccactgaagtgtttttagcaggaacttaatccaattagattttagttttgaaaagatcactttggctgctgtaaggagaatgaaacagatggaagttaagagtggatgaggagaaaataagttaggagattcttagagctctccaaacttgagacggtgactggacaaaagtggtaaagatggagagaattacaaaattgagagatctttaggagttgaactcaagagggctcattgagaattcatggaaacctccaggggttctggctcaggtacctggataaactgggagaagagctcagggaaatgatgcgtgtcatgtacagagcacagagcctcgctcggtgaacgccagctgcccaggcctggacagagcacagccccgacaggtctccaggtacccggaccctctcctggccgcttctgggaaaagcagccttaggtagtaacctacgtaacccagtctcttagtgactggctgaaactgagctattaacgactgccaaaaggaaatactctacatgaagggtggtttggccaactcagttagatctccctgcttggagaatggtagatgagaggaaggagagaggaagactcacaatggtggagtgtgagaagagaatgtcggccagttcttaggacaagctgaaataatcaaacaaattcaatcattaaaggctgacaagagtccatataattaagacctctttcttctttctttctttcttttttttttttattggagacagggtctcactctgtttcccaggccagagtgcagtggctcgatcactgctcactgcagcctcgatgtcccaggttcaagtgatcctcctcaccttggtctcccaaagtgttgggattataggcatgagccactgtatcaagccagttaagagcatttatatcaagctggattgcagaaagagaagagacaagacttcactccttttctgccctcaaggacccagaaatcctgtttctaaagccccccaccagctccagtgtgtgcctgtaagtagggttcctactggcactgaatcttctgggacttgatgtcaacctgtccttatacaggtataactggaaggtcctttccttgccagagcaggctcgtgctagaaacttggaatacaaagaaaagcttaacgaaaaaagctaaaattataatcttacaggtcagagatcatcatgattaacatttagtgtgtttccttcccatatattatatgcacataaaacatacattttaaaataaaattggggctatatgcaaatagttatgaaacatttgactacatcactatgtgggcttttaaaacataacaataacacctaaacactgtcgttaaatggcatttgcaatcctttctctgctccctccgtatgagacatgctaggctgtttctccaggtctttgacatcatttcaaatttctgtaatgacaccacaaaatgcagacaaggattttggtttaaaccatcccagaaaatgacatttctttcccattgcatgatgttttacatttatcaaagcctttttacatatattaataaaacccaacatttttacaacattttactaaattttcccacatgctcatatgacaacatctgtcaagtggtaacaataatctatctcgtaaagcaattgtgaggattaagtggaaaaacggacgtgaataatgccagctatttttggttgactttcactttgtgccagatactgtgctgaacattttatatcacatacaatcagatgtagtctatgaggtagatcctgttactgtcctgctttaagagaagaggttaactggggcatacaaaaatgaaataacttactaacttgcttacagtgacatagttaataattgatggggccagaatttgcatgcaaattcatctgactccaaaaccagggcacctggcaactcccccaattgctttgctgtgcaaggcttttgcagacagcaagcactaatcgtattcaccaaaccatgagttcttggagtctagagattcccctattcccccccacccttctctattggcatatagtagctgcttaataaatgtttggtgattcgatggctatggaaatcaatggaagcaaaataaagagactctgtgaaaagtattaagagatgtccctccctagaaaaagaccaggcaaaccaaaaaaatcctgaaataagaatattcaaagtaatttaaatttaaaagaaagaacatcaaaccctcagggaagaaaaatttaagaaagaaaaaaataaatctaagaaaagaaccaaagagaatatctggaaataaacccagtaaagcatgaaaaataatatataattaccaaggtttatcctaggattgcaaggatggtataaaataacctgataaaagatgcctaccaaaacccacagctgacatcacactcaacagtaaaacgtaagaaagattttctttaaaatcaggaatggccaggcgtggtggctcacacctgtaatcccagcactttgggagaccaaggcgggtggatcatgaggtcaagagatcaagaccatcctggccaacatggtgaaatccggtctctactaaaaatacaaaacattagccgggcatggtggtgggcacctgtagtccccgctactcgggaggctgaggcaggagaatcacttgaacccgggatgcagaggtttcagtgagccaagattgcaccaccacactccagcctggggaacagagtgagacgctgtctcaaaaagaaaaaaaaaaaaatcaggaatatgacaagcatgtccacactcctaattcccacaattagggaaatgagacataaaaaaagaaataaaaggtataaggactaaaaagggaataaaaccatcattctttgcaaacaaaaaataagaccatataaaattcaaaacttctatttatcaaaaggcaaattacaacagggtaaaagacaaattatagcctaagagaccatatgtataactcataaaaccatcaaagggtttttatccaaggtaaatagagcatttctacaaataagaaatttctacaaattttcttagagcatttctgctctaagaaaacagaaatggcaaagaatatgaacagataattcatagagaaagaaatccaaatggccaataaatctatgaaaaggccataaacctcattaatgatcacaagaatgcaaattaaagcaatatgacaccatttgatatgcctcagattggcaaacatttgataagtttcataaccaggtgttggcaagaaagttggcaatggaaatgctcatataaactggtgggagtgtaggttagtacaatcgctctggggagtaatttctcagtatccattcttttaacagctatttattgagtatttacaaggcactgttctaggtgcaagggataaggcagcaaaccgaagagataaagtccgatgtgagaaaaataaccagtaaaatagaagatgcctatttccactctaggtgttgaccgcagaggaactcacacatgtgaatgagagacacgtataaggacattgaccacagctgtgcttgtaatagcagggatgaagaacaacttggcttttccttagtaacagtaacctaatgaagagggactgctgtataatatttcctttaataaaccctagtatttgcttataataaaactggggtttattgagggaaatattaaatattataatcccagtttatttataatataactagggtttataaaggaaatattatacagcagttaaagtaaatgtggatccaacatagatccaaacatcttattggataaatatcagaaagataatgtgaagcaaaaaggctggttgccaaaggagatatggcttgtatcatttatataaaatgatgtcgtatcatttatacaaaaagggacacattaaatagtcactttgttgccaaacatacctatgtagtaaaagtaaaagaacatagtgattctctgggggtagggggagaaggatgtcatagcagtagatgatttattttttaaaaaagcacaagagtgagagatccaaagtagatatggcaaaactgttcatatctgcagaatcttggtggggagtgcatacatattcattatattgttttctgaaagtttaaaatgtttcataataatttttttgtaattttataaaagcaagaacaaaacaaaacttcagaccccagcactgagataatcgctggtgctcatcgtaccccatttcctgcacccagcccagcctgcagacagcaggtaaggcacctccgcgatgcagtgacggctctgaagagccgtccaggcttcagctgcttgtatgcattcgctcagcaaggagaggatgaaggcagcagaaggcagaggggagcagggaaagaggctgggggagggctggtgaggacgagaggtgagtgaatctcttgtactacctgaaaaggtgactgccgagaaaggacaaatgtcttccctcctccagcgttctgagaggactgccttgccttccttcgttactggaacatgacaacccagctcattctcagatatttcaacaatggcacaggtcaaacatttatccagtctctcaaggctcagcttacaagcaaagggcttgtaatagctgtgttatattttttgaatcttgtttgattcatagtcataaatcctcttttctaaattaggtgaaattatgggaagcctacaggctcttccctcaccctccatctctaaaactctctctctccctcccttggatttctaaccatctgtgatctataactttctctcttttttttttttgagatggaatctcgctctgttgcccaggctggagtgcagtggtatgatctcggctcaccacaacctctgcctcccaggttcaagcgattctcctgcctcagcctcccgagtagttggaactataggcacacgctaccctgaccagctaatttttgtatttttagtggagacggggtttcactatgttgggtttcactatgtctcgaactcctgacctcatgatctgcccacctcagcctcccaaagtgctgggattacaggcatgagccaccatgcccagccgactttctctctcttgatttatcctcctccttcactcacccacacacaatcatccaccacaggagaggtaaaacaccatttcttactctactccgaaactctgtttctagctcactgcatggtagagagcaggctccataggacatttgctgatctcctctttttctatttcatataaactggaaatataattttaattagattactaacttcttaaggcatgcttcaactctaattaaacaaagaggtctttattcaccatcaaacctagaaacattggctaaaggtagcaggaaagctggaggctcctgagaactccaattaaggcagaagccggctatatttgggagccaattaatttcacaatgtcgaaaactaacacgtttaagattctaccgttcacatccatttttctccatgaaaacgttttaactgtgttgtgcctgtcatcatcttacccagagtgtctgtaaaaactttcatgtaaggaagacctcaggattgctagatataaccaaaggcttactctttaccttctaaaattgcagtcaattttaagacactttcaagtcaatccgcgttcatcaccaaagtgagccctgagtactgcaaaatgccttttgcactggcttctaaatgaagtggaggtgggagctgctttcctcctctaccctcctctcttgggctttccactggtggactcaccttccgctatgacctcaactactattgacaggctgatggctatgaaatcagtggtgatggtgacaacagtgatgacaacagccgacatttgcggagcattgacacgtgtcttaaagtcaacctgtctaaaactggacttcttttcttctcctggaatctattcttcctgttgcatttctcatgttaattcattgtttcattgtcaaccgcatcattcttgagtttctcaacttcttagctcatcagatcccactgatttctcccgcctgctgagtagaactaggaatgatggtctctctgatcaattctttcccagctcccctgcccagtgcttttgttcagagggcacacttctcatctgccaactggccctgcagccttctagttctccctgaccctgctcatcttcgggactgtcccccagggatatttgtgtggcacggatcagtactcctctgtgttccctgcctctgcccagtcgctcaggccaaaatcccaagagtatccttgattcctctctccctcttctccctcattgtacccagcaggaatcctgccacccctgcctccaaacactctgacccttccctctttctctttccccactgctgcagagattgttcaagccatcaccatgcctcctgcaggcctcaaaataaccaggaagggcaagaataacctgcccttctcccatgcagtccacagagtagccaaaaagcagctcatgtcaacttaaccctagaatcaaatctatactcttactccagcctctgccattcagcccccagcatcatctaccattcctgctcttgcccaccaactcagccatgttacctttgtgtctggtgaacttcaaatgcaccagactcaccctgccttagggcctctgtgccagctgttcctgctgcctgacagattttccctcagctccttgcatgtcctctctgacactcaggtctcaattccaatgtcaccttcacagtcaggccgcttctctgatcatccattctcaaatagtttcccaggcactaacacatcgtcttggcccttcactgttgacttatttgctcacttgtgtattttatgtctccctctgttgaaatgtaagctgtttgaaagcggggacctcgcgatgagcatctttcctctactgtaaccctgtaaccccagctcctagaagagtgcccggtacacagtgattgctcaatacatgtttgtagagtgttgaatgaataaacagggatgtcactctagttaaaaacaccctatttttcctactgccatggaatctagtctgatctctgagcctgacattcaggctctcgcagtctagttctgacctgccaaaattaacctcctgctactccctccctcctcacgtttctaatctgtcttatttttttttttttttttttttttgcctgaatatagcgagtgctttcacactttcctgcctttgcaaatttggttctcactgcctgatgattttccctttctctgtctgatgagcttctctcattctgcaacaaccaagctccaacatcccctcattcaagaaggtgcaaccaagtgcccccaagcaagggagctgttcgctgttcccacgccctttcatgccggcgtatcagacttgggatggcgtacagtagacccttggcgctggcagtcctgaaggtcacgtggcatgtgagatgtgaatgaagataacaatcctaatcacacgatcgtgaaatgagatgatgagtgcaaaacgccttgggtgaccttgactcacccccatccggaggcaggtttgaattaacaagttacttaagtagtgagtgagcaccgctgaccaatgaatatgtgcataacagcagtcaatttagggattcccaaaggtttctggacatgagcctggtgacagtcaagggccaactgtattataattacttatgtatctttttctcccttctcagaaacaggcatgagtagcctggctcttcttaggcgtacggaccgtaacagacactaagataaaggtttgttgcatcaataactgaaataagatctatgtggatgtgtgagtccgtgaatgcaggaaagactcaccacttcccccaaacacttacctctcccacttgttaatgcccaaattattttaccgagggacaaaaccttttattttacaatggaagatcatttaggcctcagcaaaatgacaaactgctacatttctcagatcttcatggttgctcaagaatgatcaaaatagtaaatgttacacctgcaggtgtctagaagccagagcttgtatctattttgtttaaacatctgtctctccactctccagtgagcacctcaagaaaaacatgatgtctcactgttcccatcactgtccccatcatcatacttactggcctcattgcacttgttttctttctttgtatactcatgtgatgcctacctacctcctttgaaatccaggcttcgtgggaatagaccatgtaggttagccttacaggtctatccccctgtgcaccccacacaggagatgctcagaaaatgtttgttgaataagtgaatgaatgattctataagactgcccatttctttcttcatgtctgatcaaagaaaactcaatccttgtattatgaatagctaacagtgagagagtcaaaacccagattaatggacatttacaaattcctgatcaaaagtgattttatacaattgcattttcctggaaggaagaacagactatgaccaaattaacaaaatgataaaaatagcataggaaggctggttgcaccatgaataatcattgaaggactaaacttttgcccttggggtaattttagaatttgggacttcactagtatagcaagaaaatattgagttccgggcctggtgcggtggctcacgcctgtaatctcagcactttgggaggccaaggcgggcagatcatttgagatcagaagtttgagaccagcccggccaacatgacgaatccccgcctccactaaaaacacaaaaattagctgggcatggtggcaggcacctgtagtctcagctacttgggaagctgaggcaggagaatcacttgaatccagggggcggaggttgcagtgagccgagatcgcgccactgcacccagcctgggtgacagagtgagactccatctcaaaaaaaaaggaaaagaaaatattgagttcctttaagtgaattgacagtaatggtgttttgtttaatacataatatacttaagctatattttcaaattatttttattattttccagatgcttttaaacaaaaatacaaattcctatgtcataaagcgtggtccattggcaaatggaaatcaataagcaagtgacagtgaagaagctattgaaaagaacaaggacataggccagccccaggttgaattccagcctggcccacactggctatgtgactttaggcagtgactcagttctctgagaccaggcttcctcttctggaaaagcagtatttgcaaaatcccgtgagaaatcgacaagataataacatttgcaaagaacccacactgctctgggcaccataaatagtaacagtaatgtgtaacaataacattcatctcagaaaaatgtggcatcagcaaagaactggaaatgcttgttttcagggttaaaaaaataccattagtgtttcttcactaaataaactagtaattttagtagcccaatctggaggcctgtggtttaacaagcaactaattagaaactggtgctccctaagcgctgagtgacacctgcttttaaaactgtacccacagagaggagtcgggtgcaagggacagttgctggctgtgctgtctccggaaaatacagcttaggagcaaatcccagatgatctcttttaataaaatcttctctgaaaaatacatgggttaataatatgaacaaaggaggtttgctgaggtcccatcagtttaattccacccagtatcagattattcctgccaggatgggctgtgaaaataatgaaagcaataattaaaagtaaattatgcaaatggcaagggcaggaatggtagattgggagattgctcggaaggaagagtgatttgatctgatctgttcaaggagccgaccacaatgatgctcttacccacccactgagcatgcctctgccattcctcctctaaagtgtccacgaggtcctcctctctgcccacagggcagatctaaagctccttaacctggcattcaaggtcctttatagtccaaatccctgccaatccttccaaattcattccctctgcttcctacaccaccccttccatctataccgaactacttacaattttccaaactcactctacatttaatgattccattcaggacagtattggagagaaaatttattttaaaagtcaatgtccatgtcccttaaagaaagtgatccacaatttaacaaccatggataaatcctgccatgggaactgaatctccctgtgaaatttctggaaattacaaacacactccacttccctggaaagtcaccctttcaaaaacttatccctctaagtcacagtcctgaacatggaggtaagatagaatcgcctcccatccacccatccttccttccatctttcgaaaatataaaaaaaactctatgtgccaggccccatgccaaatgccaagggcatgaatgcatccgatgtggttctgagccttgaagagctcacaggatgtttaaaccataaatccagcattccttctgctgggttcataacgggcactaaataagtatttgttgaattaagacaaacaggtaaactaataatgacaatataatacaggaactactgtgccagagtggacacacagagtgccctgggcctgggggtgagatgtgcaaaggcatagaggcatcaaaaagcgtggcatgcttgggggtctcaacaagccgacaggagctggggaatgagatagggagagaatggtgggtagaatcccagaatcctttgctcctgggcccccttcccctggcatgacctcatcagtttccacttaagatccacacaggcacaaaacacgcacacagccctctggttttgccacagctcatggccgactaggcaaagcaggtggggcttacagaggcaggggctttgaccacgggaatcatacctggggccagccttcaagatttaggaagacgaaaaagttcttgtgcaaaaaacagttaccaggttaccacacagtacaacaggctgggaaggctatcctgtaacccctgctgtgtgctaagcccgctgacttattttggaggtgacaggcatgctcactacccacaagtgtccgtcaggaccagtggtcctcaaacgtgatttgcatatttgaatcactggtgtttcaaagagtgttcttttaatttttttaaaaccatgttcaggctccacccccagaaattctggtttaattggtctgaggtggagcccaggcagagaagttccctattggttccaatatgcagctgagcttgagaaccactgtttctgggattttccagggtccccactcagcctacccccattcattagatcacctgcttggccctgacagcacttgggacccctgacctctgccgccttctctggtcctcactatccctcatggtgtggtcatgtttagctcaatttatacatagaaactcagattaaagatcctgttccaggtagcccagctctcaagcagaaaaatggggactaaaaccaggtatgtccaggtctaacaaccacgtcctttccacagtgctacgctgcttccttgcagagctgagctcaagctgtccataaatattcaggagtcttttgagctggttgttaaaaaccactgatagcctgaaattagctgtggtgggaatatttacaccatggaaatagacaaacactacccatcaggaagtgttttgttttgttttttgaaaccagtttgccagcacacctcttaattccaaggcaccaagaaaaaagaaaaaatatcaaattatgttccttcaatttcaggaagcagctgtatcatgcattttaggaagatttcaactccaaatagttaaaattgaaagagctttttgagtttagagagataaacctcaagtgtgcgaaaaatatacacctgtaatttttatcaagatgccacatgggtacagatgcattctgcatgctgctatgggttgggtgcatttgacttaaagtcacttagtgtcagtgaaaaaggaaaatacaagtgtagaacaaggtccctggaagtgctccctatctcagccacagagagcataatagaaaatgttctctgaaacaagccacctggcagcccacctctgcctcagataccttgatatgtggagtttcaatattggaatgctggatgggagcctcctattacagaataacaagagagactaacagaagttacttaccccccaggatctccagtacccccgcggagctcagctttaagtggtccccactgaacaaagaactgtgacatttctctccccagcatggttcctctaacagcagggctcgatagctacaaagcctggttatgctggtgccgtgcttttggaggatggaaggagattgtaaattgaaaaggaataaagaaaactaccatttactgactgtctactctgcaactaggcactgagctagacactctcagacctggcactagaattgacacttactgaataactattacatgtcaagccctattccaggcccttagctacattagctcattgcatcctcttaataaccctgtgaagtggctccaatcatccctattttacagaggagaacatagagatgtagatagctgaaagcatttcctaagttaacacaaccggaacatggcaggcaggaccagaaccaaagcaatgatcctggggctgctcttctgagaaatggaaatgcttctggcagacagggaattgtcactgacttgaactctagtcttcgggtattcagtagttaccagaaaactaaccatgaacctcaatatcacagtgacagaaaaaatgtttcttacatatgtttctgtaattagcaaattatagaaacgatttgtaggtagctactgttcatcaagtaatatctaccacctctgggaactctgccagtcacttgatgatggtgattacatgccgctctccaagcccttccatacgcccggcacaggactaaacaagcatttaacatcgatccttgtaatgactggatgaggtaggtatggtcccagtttacagatgcagaaactgaagtttgaagagcaacttgctcaaggtcacagagccaggaagtggcagaaccaggctggagttcaggatctggggcctcaaaagctgtggtcctaactctagctgccaagcatgtgcgctgcagagtgggttagaccattcctgaatgggtgacattgcatggctactcaggggtcagtaaactgctgttttctgagttcccactgcaggaagctagtgcagacacaacacggtataagagcaagaacatgacctgatgcaagctttgggcacaaagggaccaaaatgggaatgtgtcctccctagtcatagggctcagcatttcttaccaaggcatggctgccctagaaatgtggaatcttggaggtgagaatgaccttcaggcaggctgggccagcctctcacacaatgtttgtgtcaccattgcaatcctgagtcagacactctgccactcactcttgtgagatggggccatctcacaagattgtgtctatgattaaatgagatattagtaaaagtgctaaatccaatgactatcacattagttaacagcaattaacatagttaatccctccctcatccaaccactcaatacattttaaattagagtctattatgtaccaggcttgggataaaacccacgctcaagcttcagggctgatttggggaggaaaatcattgattcattaattaatttattcaacaaacatttactattctatgatggcactaagttaaaacctctaagacaaactcgttgtcttagacggaatccaacacaaattagttggatgactaagacacattcaccagtaactactgtgaaatgacaatgagcataataactaacattttgtgtgatgtctcatagtttaaaaagcactttcacacttgtaattgggtcttgcaagaaatgcagattcagatgagtcaagtgacctgcctggggccacacagtcagtgcaaaagtttgattcaaatctaggtgtctgacaccaaagcttggctgtctctcctctaccatctgcgtcacccggctctgcttgggtccatcagtctgcccagtggcagccctgttccacttttagaaaaccttgattatgagaaagtttttgcaaatattcattaaaaaatctgccttctgcaaaattctatctcatttctcttagctcttctttccctccagagccatactgaataaatgttcctctccctgtcctcagagaaactttaagatagtcttcctcaagtcttctctgccccaggcaacatgtctgggtcttcagtccttcctgttctgacacaactactaatccctccccagcttgctctgtccgcatccatccagcctctactcacactccctggcttggtggaggttatctttcaccttttccctatgactaaggaggacacattcccatttcggtccctttgtgcccaaagcttgcatcaggtcacgttcttgctcctgtaccatgttgcgtctgcactagcttcatgcattggaagagtattccaatgactcttcacccaagattcagttatgaccctcctaggcgctctgcaccccgtatcaccgcactcctcaaatgatgttgggatcttccatctgtgtgtcactctttgcaggcagtgagctccctgaggccgtgggctggtctgtaaccatgatcacagcacagcccctctccctaagtgcccaccacatcccaggcactgtttaggcaccttccactgagtaccccaaccataccagataggtgctattattaaattaacccctgtcccaaagcctgacaaagggcaaggattcatagattttttcaggactgaatgaaactccaatttattcatatcccaaagactggtgtcaagggtggtttctctgaccagaacaaggtagagtctgacctgaggccagcaggtgccacaggggtccttcagagagcctggcttctcccggggacacttgagagctcaccgggcaagggagagaaatgaaccgtatcgaaaaatgtggtctggggtgagacatcagcaataatcactgccaggaaaaggagggctgctggttagtgccgaatgccaatgacaggaaagctgcaagggactgaccaagcctccctccaggctttgaggagcttgtcgcctgggctcctaacgacacgagctctgggatgaaccgaacctggctcaaatcatgactctgtccatgacctggagtaaaatgaggacaataataccttatagggttacggtaaaaattaaacccgaaagcgcttggccacagtaaccctcgataaatgtgatgttgatgatgatgacgaggggacaaggaggctgcagagtgaagccacagccccctgctccatcttctttctgggcacactcactgccagggctgcctctggcacacaaagctgtcctgtaaagcctgatggcggaacatcagctcgtgaacactctgggtctgtgtcaaattcccactaatgatttctcagcataaattaaatggagtgaagattttctaatggccactacagaattacatgacagcttccaggagaagctacaaaaatagctggaatcagaaggatggtcattcggatgcctgcaagtttctcattaatttaatttcttctttcctcctggcttgtggatcttttttgtaagagctgacagaaaagacatgcataacaagccaccaggtattcccagcctatttaaataagcctaaagagagagcagtgaccatattgtatagcaagtggaattcagcattgcattaaaaccaccaccataaataataaaatttatttatatttacataaacttgcataatttacaagggacacttatgtatttgtctttatctcatttgaccttctataatttatggagcactcatcatgggcctggcatttttaatatattatctcacttaattttcacagtgactgattattatctctattttacaggcaaggtttaacaaagtagaagaattcctctggaatcacactgttacaggaaagaggtcctgatccagactccaagagaggtttcttggacctcccgcaggaaagaattcagggcgagtccgagtaaagtgaaagcgagtttattaagaaagtagaggaataaaagaacggctactccatagaacagccccgagggctgctggttgcccatttttatggttatttcttgatgacatgctaaacaaagggtagattattcatgtctcccctttttagaccatatagggttacttcctgccattgccatggcatttgtaaactgtcatggcgctggtgggagtgtagcagtgaggacgaccagaggtcactcttgtcgccatcttggttttggtgggttttagctggcttctttactgcaacctgttttatcagcaaggtggttatgacctgtattttgtgcccatctcctgtctcatcctgtgacttagaatgccttagctgcctgggaatgcagcccaacaacacagcccaaaagtggaggactagggccgggcgcagtggctcatgcctgtaatcccagcactttgggaggccgagctgggcagatcacaaagtcaagagatcgagaccatcctggctaacacagtgaaacccagtctctactaaaaaatacaaaaattagccacgtgtggtggcacacacctgtagtcccagctacttgggaggctgaggcaggagaatcgcttgaacctgggagacagaggttgcagtgagccgagatcacgccactgcactccagcctggtgacagagcaagactccgcctcaaaaaaaaaaaaaaaaaaactggaggactaggatttgaacctaggtctgtcagggtccatagcttgttctttcagctagttacccagcttctgtttggggaggaggcactttttccatacacttgatagttctttcagcatgagaggaacacctttggcataatgtttctggcctctcctgccccccacacactctgttcccctggggaaataaaatgccttgtttgattggtgaatttggagacactggcaaacgtgctcagccccttcctctccttcctcatggagctcattcctgctgccctccagagcctggttctggttcccacaaacctgcctggggttgcagggggaactgctgcctgcctgagtcaagctccggattcagcctcaggaagctcatttgcccacagacctgacgcattccccagcagcacttttttcataatgaaggtgatattttggcccttatcctctttatttctttatcttattctcaagtaattcagaacccaagtggaagagaggaatatttattggccctccttcaaagattctaatgattatgatcctcattttacagataaagctctttcctaagaaaagagttgaaatgttggcagatgtgtgataaatagccccatacattattatgctatatgaatgtaattcctttaattcagattagtacatatagtttaaggaggaggaaaatggaggactggagtgataccaccaaaaatgactcatatgtaaaacaaactaaaggagaaaacacaacttcaaatgagcacgtcataattgaagaagaagccatgctccaccaatttagagatctttgtctggggtactatataaggtgggtcaaatgccaataagagcccagagtagaaaattaaccaaagcagccaggcactgtggctcacgtgtgtaatcccagcacattgggtggctgaggcgggcggatcacttgaggccaggagttcgagacctgcctggcaacatggtgaaaccccatctctactaaaaaatacaaaattagccaggcatggtggcgtgtgcctgtagtcccagctactcaggaggctgaggcataagagttgcctgaacccaggaggcggaggtttgcagtgagctgagatcgcgctaatgcactccagcctgggtgacagagcaagatgccgcctcaaaaaaaaaaaaaaaaaaaaaagaagaagattaaccaaagcatttcccaactaccaagaaagaaccaagaaccagtttatagagaccaacccctcccccaaaaaatccacaaaaaagtaagcaaagcaaccaaaaaacccgacgaaccttgcatggggtacaaaaagctcacaatcgaagcatgctttttggagccatctataatttggaacccacccagagatttacctgttgctggagttctatcagaacagccacctgtacaacttgcctgaggcttactactcttattatcaataattgagttaacagaatgttagggccaaaaatgtcctcagtagtcaagcccaagcccttgctgaagagagaaagcccagatgacagagctggccgagggagcttctctgaactacctttgcatccacaggacccaacacagccccagccccactgtatgtgagaaagaaccacgttagtggcagggccggggctagaacccgggtctcccaacactagtattgcttccttttcttacagtgcatcagctgcagtgacacttgtctgttcacttcatggatatcatgtattcactgttgtgttatcataggccaagtcaacaggcctgtgaaccagaggaatgatctctcataaacaaacaagtggtggaagggtgctaagattcaaactacaggagacactgaacaatagctgaacatggagacaagccccactctgtcccccagttacaagcaccaaagatgctagcaatgaatccaggctgaggataaatgcgaaaccttgtaatatcactcttgtgaagcacacagattctaagagaatcaaaaaatggccttctgtatccagaactatttttagaaacacaatcctatttttcttcttcaaagtaattagcgttcataaccagaactagagcgtttcttctgaatgcaggggagaagcaaacctttctcttcagaagcaagaagctagatggtgagagactgtcaagaacacattcagtgcaagcacacacacacacacagacgcacacacacacacacacacagacacacacacacacatactccagatgataaacacagcttccaattaagctgccctcaactagctggcacctaatacctgttggtttaaaaacaactggcaaaatttgcaaagtctaagggtttttaaaggatgaaatctttcttttaatttttttgtatctctctttttaaagataataaatcacatgcatttacagaattgtagcatttttgcacaatagcagtctctagagataaacagaccacatgcaagggaagcgtggggactggctctcagtcaagttcacagagcagccacaaggcagacactcagcccaagacctcgactcccagccagttctcctatgtggtcagagccgcctttccacatcaaagagaagttcatgaaaatctatggagcccatttgcaatatgaggtgcaaatcgaacaaatgttttgcatcagggataatcttaattaaactatttaatacgagcaccgttggtttacttcaatcttcctgaacttcattaagctgtccatttacttatataaattcccatcttaaaaaataaaatgcatatagtttgtgtggtagaaaactgtgtgttttaatatacatccatgtgtaaaaattgtgatgatgttaacaatagtaataataaaactcatttgttaaatggcaataggctcaacattgtgatagggactttatatgaggggaacaataaggaaaatcataatataaatttagtatcactcattaaatgcttcccatactcaggtagtatgtggtgcagttaagaactatcattcatgtaatgatcacaataatcttgttaggtggctattactgtgagtcacattttacagatgaagaaactgacgctttgagaagttaaataactgccccagatttcacagggagcaaaagaaaaagtctagagtcaaacccaggcccactggaccctagagtcctttgccttttccactgcacaaggctacatcctcatttataaaagtattgctttgacctccatttccagcaaggacatttatagatccaaggacaaactaaatggtgcaaagatgacctgttcttgataaaggccttcgacttctctatggtctggaacaaagtaactctgctaccaaattttctgagggaaaatagagctcacagcctcagggtaatcagataatgcttaaatatgaagtggttcagaaccacagtgaaatttgggagtggaacataatttatctattgttccattttaaaatattcatgaagcaaggaagcatttccacattcaataattaagtggttaaaatctgcatcctgatatgtttactgatcatgaatagtgcactcctagaaggacctaagtttaaattagcagcccacaggctgccatgttacactgcaaaaccagacaaatgagacagaaatgttgctgctgcctagagaaaacattttcccaccacttattctgctgcagagaaaagctgagaccaaattgaaaatgcacctaggactttgcctgaaaaccagctggaagagcatgaaagggggagaaaaaaacctgcaactttctccttcgttagaagaattgttgtaagatggtgtgattgttccctaaaggttagattttacaatcatttaatatttcacttgtcttaagaaacccgcatagaaaggcagggaaaggaaacattcctaaaaatgtgaatttaaaaagtggctctgttttgcttcttcagttctgtggtcacaagcaatatatgtgacacctacgagtagagttgtattaaactgggtgtcttgttccctgtattactggcaagctctgtttcaatggcctccctcgccaggggcatcctccatcactgtgcatgaggatggggcctactggccgccctgctgagagcccagtgccaagccctagtaggtatgaagggctgcttcccagggtcttccggtggcccgggacagacacaaggccgggggtggcaggcaagtagttctcaaagtgttgtacctggaccagcagcatctgttttacctggaaacatgtcagaaatgcaaattaatcagaaactctgggagtacagttcagcagtttgggctttaacaaacccaccaggtgattctggtgcccactaacgtttgggaagcacccagctcctcttctgtccttactcagctgcaggctccaaggttctgcatccagtggatctgccccatccagtcctacgccttgctgacctcagcagggagtagttagctgactccaagccccagaagaaggggagtctgggagtggccttgctgactcaaaccagaatctgatgccccgctgtgccctccccactgcatgttggcccagctggctgttctaatagggctgtggttctatcctcgactccatggctaaggcctcgtccttgccactctctcccaccccaacccctccctcagggcaggagcttatagtctcaggtcttcctcaaaccggctagccagtctgaatcagggggcgccttctaccactgcccagggactcttccagaaacagcctgcccataaaggccctccaccaccatgggaggaagaaccctgatccaaaaggaaacttggtcaatctgtccctacagacttgatcatttgagctgctggccctgtcctgatagcccacatctccccgccccctctttcctcctctgcttccctggctttgtaccccgctctgagcctgtcactgagactccagaatggctctgggctgagcacacccagggtaactgtaactaagcaccaccaattactgagtttgcagaaaatactgtgcttataccctggcaagtgggcccctgccttgtgccctgcgtttgagagggtccttctccagcccaactctggtagcccccttcccaaggggcaaggagtccttgaggccaaggaggcgtgctcacatggagcccatgccctccctcctccgggagccccttctaggtatccaggaccccgaaattcccctcctagatggctggagtccatcctctcaagagcaaatggtgcttctggggccttctccctagacctgaagaatggccaggaacagccagttgggggtgggggtcgttgtggacagagctgagatgtgtgaactgtagggtctacccaactccttacagtggtagatggagtcaggattgggaagagaaggaggggctggaaggaggctaacgcttcagtttgttttctttcttgggcctcaaaaaaagtgaggggccagcctgccatgaaaattaagtcagatagcgtatgtcatgtacctagtaggaactcaatagctacttgtggaacgagtgtccccagagatctgcttcagtgccttatttggtcctcacaaccaacctgcaatgtaggaacagtatgctcattgtctagataaggagacctggactccaagaggttaagtgacttgcccaagagggcacaactaagacctgaatggctatttagccttggtttgattacttctaactacacggaacttgctactcctttcagtcaacccttatcatttcaggcgaagtaagtcattgctgttgctgttttctttctttctttgagcttaaatccctctgcaaatttcagtcatgggtctttgctctgccttattggtgcccgaagagacttcaccccctttcccatataaccaccttcaagtaaaaatggaaatgctatcccctggggtcttttttctcgaagccaaacacccttagcacctccaccatttcctcctggcagaggacttccagtacccactcctaatcaggcttctggggacagattccagtttttctctcctccagcacctcacagaggtcatggtgtatagaaacagaggcttcagctagtagatttggacacaggtaaccgtttccatgaccagcaacctaccctcgaacacatagagtcctaaagcctaaagcttgtgaaatgccatgtggtttgagtcttggtttccttgcctgtgaaatgggaagaatgactcatttcctgactaccttgcgtggttgggcaaatatcatttaggataattggtctgaaatgactctatggacttccaagccctgcacaggtgtatggggagatgggggctgtaatgacaatgagcagaggaggctcgctggggaagcctggagaagcaggtgctctagggaaaccctcactgcctgctccactcaatagtccttaatcactccttctgccaggcatgggcaccactttacaagggggggggtccagtgcttcttaaggcccccaaggcacttgcacaactccaaaagcctaaaagtgaattaagacaacagaggtaatatgcaaagggcaccttgaagacaggatgtttctgtgcccagcaactgagccagcaggcagggccgagctctgtgagcatgctgaggtggaacagggttaagaatgcaccaaaaagaggagtgagagtcaggatctgaacccagacctcctgtcctgggttcaccccacttcaccacatttgccaccgaaatcacttggtgtagacagtgtctaatccgcacatggggaccaaaccgtccctgtctactctgtggagcaattattgttgtaatgggccacacctcctcatgagcccccggcccatgtacccaactacctattagataatatcgctggaagtctcacgacccttcatcaggccctcacaaagctgttcttctcccagcttctgggacctccatgactggcaccagcagccacccagttgctgaacctgggcccctttcttggttcttccttcacagtcacatctcagatccaatccatcaccaagccctgtccattcatcctcctaaaaacgtcttaatacaaacatttctctccatccctactcctgccacctaacccacatgaccgacatcccccaaaactcgtaactgtcccacagccacccttgcctcaccccaacttggctttcatgctgcagccaaagtgatggttttaaaacataaacctcatcgtgtcagcctgctttgaaaatctgtctgttgcttttaggaggaaaagccaaatgcttgacttgactcattaattaggccctgcagctctggccccatctcttgacaccgtccctgcttgctcactgtgatctgtattatacattggacttctttatttttttctgtaaaattttcaaatatcacacatatacaagcatgtataacatagatacatacatttaaagaataattctaaaacctatacagccaccacctgggttaagaaatagaacatagccacatctcagcctccacctgtaaccctctcagatcacacctcccgctgcccatccctgcccagaagtaaccaccttaaacttctgatcttttttctcacttttcttcatatttgactacttagggttacacttctataaaacaaagtttagttttgcctgttctgaattttatttcgttgaactgtactgtagatgttcttgtatgacttgcttcttttgctgtacctcaatatccatgcacgaagctataattcatgcattttcattgacgtatagtactccagtgagtgaataaccataatgagtgcattattctgttggtggacattaggttgattccagcttagagcttttataaatttgtcaatacagctatgaatgttctggagctgtccatgctctgagagccccatgtcctgtcctgccttgcagccctcaccaagatttgcttccttggcttaggtctccctcactgcctccttcctgacccacatctcctcatgcccaggcctggctcacctggctgttggtgcttctgctgcctcctgcacctcacagaggctacgggcatcaccgatccagcctctagcacagaacctacatgtagcaagccctcagcactcattcatgcacgtatgcatacttgcattcgttcacaccttagcagtttctcaggaccggtctacggtgctgcagaggcatggcgcagtccgggggaagaaaatgatcctctctaagtaaataaaggcatcccccaagacaggaattgcacatccaggaaagccagccccacagctagacacagaaggctgctgactctcactgatgagatgcacgcccagagaggatgagcctgggggtggatcctcctgctctgaaccgctcaaattcctccctctcccacctctctcattagcctctgtgatgagggttgcaaagggctcttcagctgcttaaagtgaaggaagaaatggaaattgcttcaaaagaaaaggaaggaaagcagctagagaacactgccaaacacttggtgtgataaccaagggttttcaaatgatgactgaaactggctttcattttgatcttccatttctgataatctaacagatcattagaagaaaatcaagtccatcctcacggtcgaagatgaacctggcactgctgtagcactcttcccactttaccacctcttcctccacacttttttcctcaagaaaaaaaaagaaaccctttcagcttacacatattgttcagtttatttaactacattcagattggatattttccatgtcaaatactttcttaggaataagcaacatattccttctctccaaattaagaacttctcactgctttgtaggtttaaaaacatccaactgaaaactcccttttatggatgaaaaaaaaaagtacggagagtgggaatctctgccctatttatggtgataaatgccagagccaaatttacccccaagagtctcgctccagggtcccaaccctcacccactccactcttctactctacattgaaaaccagagtacatctctattcctgctgccccagggactctctctaccctacgacaccattctcattgcacacagagctttaagcatagatgctagaaataaactgaacattctccaatagggaggtaaactctggtccagtcattgatgaaaatgatgttcaagaagagttataaatgagaaaggggcaataactgccttataaaagggagaaaaataggccaggtgccatggctcacacctgtaatcccagcactttgggaggctgaggcgggtgaattgcctgaggtcaggagttcaagaccagcctggccaacatggtgaaaccccgtctctactaaaaatacaaaaattagccaggcgtggtggtgggtgcctgtgataccagctactcgggaggctgaggcaggagaaccacttgaacctgggaggcagaggttgcagtgagctgagatcgtgccactgcactccagcttgggcaacagagtgagactccatcccataaaaaaggagaaaaataaaaacagcataccaaaattacacagacagtatggcttcaactataaatgacaggagaagattatactatttttattaagtaaaaagttaatcaggttagctctgggtggctgactttgagggagatgtcatgctatgcacttttcagtacttcccaatttttccacaataagcacacattactttcataatgaggaaaacattttaatacgaaatgggcagcagggaagcagcatctgtcttctccaccccaaaacgcccctttggaactatgatgggtggtcctgacccaccacttgtgcctccccagctccacccaaccctgtcacctgcttcctgcctccatacttcctctcccaagcctacttatatattcttacttatccaagcccaagctagtgcaagccccaccttctttatgttcttcaagaagcttgtcttgaccattcccagccaactattaggttaaaccatatgacattgccattcttgtattccagaagttgtctactatcagtgatttcatatgactcaatctagtccttggctcaccaggtcttcttatgaaacttcagcctgttctccagtctggaacacataactgcaaatggggaattttctgtcttggactctctcttgtctcatgtgagatcctgctttaagtcactcttctttgtacattggcttactttatattcattctggttgtgaacattattgaaaataaagtcaccgcctcactgaccatagaccttccttacccataagcacctgcttgggttctgcgcttggccctggagatagagacatgagaccctgccccaaagtttacagacagagaacaggccttggataggcatgaacccaaccagggaatgctaacgccttgcaggcacccatctctttcatgtgctaaatatctgcacgtctgttctcttgcagggcgagagctagacagacctggctttaaatctcagtctgtctctcataagcaggtggacttggccatgccactcaacctctccaagcctcgatgtcctcatctataaaatagaggtagtcatagcccctactgcagatcctacgtgaggactagctgggactatatgtgaacatttactaccatgctatacacggtcagcacccaagaaacactcccctgtgaaccaggcagagcagaaactattattcccctttttttctaatgaagaaactgaactccagaaagtctaagtgacttttctgagaccaaggtggagctgatactaaaaccttggtctcctaagcccagcatgtgctgtgttctgggctaacaactgctgattctaaaagcacacgaacatttaaggttcactggtgcaactcctaaggaaatttccaaacacatttgctacctcatcactacctggaataactttggaagggcccacaaagaattcagcactgccatttccccgtaatggtgactgactggccatatgctcatctagtttcccatctactccacccacggcaagagggagagcatgcctacctgccggcagaggggctcggctcctgtctgatggccctgtggaatgacactctcacatcagctcaggaaattcttccccatacatcttggaaatggttccctctcaacagacttcccacaaataaggcttttgctgattacttctgacttaatgcttaaacgttttcaacggaagagagttgtctggttttacttcttgcacataaaataatgcacttatcattagtcatctccttcctgctcacacttgaaaatgtatgcacatttttctcatttgctatcatctgaaacctgagacctttcaaggtatggggaacgcaatgtatcttgaagtcaggaacctcagacaagttgtggctttttatagcctccaacgataataggatgacagttcggttcttcactttttgaaaatatgatgaaatttctggcttttgctccagaaaaaaaatacacatatacacaaaatcacagatacctttcaagacttcatgcattccagatagaaaaacaactccataacaaacctgctcatggacccccgaccctgaaataaaagttggaaaaaaaaaaaaggtttcgaatactgtgccagggactaagaataaagactgtgacacattcattagaggagaggaaaaaaaatcacacacaaaaacaagctcaaatttcttttccttttttttgttttttgttttttgttttttggagactgagtctccctctgttgcctaggctggagagcaatggtgtgatctcagctcactgcaacctctgactcctgggttcaagcgattctcctgccttagcctcctgagtagctgggattacagggatgtgccaccatgcctggctaatttttatatttttagtagagatggggttttaccaagttggccaggctggtcttgaacttctgacttcatgtgatccaccgcctaggcatcccaaagtgctgggattacaggtgtgagccaccgtgcctggcctcaaatttcttgacattcaaggccataaacctccggctttgggtttccatctagctcccaccttcctctctcctaatacactccatgcacccatccctcctgcctacctgaactcctcgaggctcccccaacagagccttgtgcctttgttttcttcactagggacctccttcccctcattttcatatttcaaatcctactcacgctttaaacctcaggtcaagtgccacctccttgtcagtttttaaaagttcttcccatcaggaaataacctctccccacacctgcctctcttggcaatttgtctttatgcttgcagtacttagcacattccaccttacagatattgatgcgtgggtcttgccacccctactggctggcgatctaattcacttctgcagtcttcccctgacacacagtaagtgctcaataaacactcgagataaataaatatctgtttctctaatccacacatggtacaaatgaaattcaaataagtatgcaaatattcatttctctgtgacccagacttttttatttatgtaaaatcttcaaaggtgcttggggtcaatgtgtgctggtctgcagggtcagggttcctgattgaactctcatgtattagtctgttttcacactgctataaagaactacttgagactgggtaatttatgatgaagaggtttaactgacttagagttctgcaggcttaacagcaagcatgactgggaggcctcaggaaacttacaatcatggcggaaggcaaaggggaagcaaggaccttcttcacaaggtggcaggaaagagagagaagcgggagctgccacacagttttaaaccatcacatctcatgagaattcactcgttatcacgagaacagcatgggggaaactgcccccatgatccaatcccctcccaccaggtcttgtggggattacaatccgagatgagatttgggtagggacacagagccaaaccatatcacctcaggaatcaattgagcccagaatttcaactggaggtcagcagtgcacacatgaatgggccattcagcaggatagcggatgattcttcaggaagaatctattctccagtcagaaagatcatgttctgtgcttacgacagcatgcttagtttagatagttaagaactcctcttcgttatttttgaggggacttcaataagaggtgccaccaatttaaggggcagggttctgggtctggagaatttctgattaatatttctctaatcttctccaggattggacaaagctacattccttggttgtacgacaaggcccagccacaaaacagagtccactgggagattccttgttttctgttctctgagaatgtttcaactttattctagattctacatagaatctaccggatttggggattcatctattggcaccaaacatggcacagggcccaagagatgtgcttggagacaaggtaagaagtaaagcctgagtgcccaataaaacctttagtggacaaacacttccgaattaggaccacagctgcttggcaggctgactcctctctttacagcaaacctggttgttagggtgataggaagtaatgaaatggggagaggattgtgaaatgttacatggaaaaaggggcttctgggccatatataagtcatgttccaaatatatacctctgaataagaggaaagcagtccataacccagctcccaggcattgcgtggcatcatgatatcaataaaaccccctccgatttctccaagcctgtctctgtcttcatttatattacactggggtcctgaatggctatgattcttgagaaaggagtccagttccctgaaatatctatgttcaggagaaggagcccaatactagtaaaatgggtcccctcgagcccaaaattaatcaattgatggaacaagcatcttgctttaaaaataattgagattgcaatttatttacttctgcctctgacagaagttttaaaaagaaagacttaggctgccctaataccttgagtgaaagaggaaattttccgttgattattcttatttttttcccataccttcaaagttaagctttgaatgtgaaatggaaactggagaccaacacagcctcatggccaggcaaacattggtgtaggagtcaggcccaggacccaggttccagtctatctcttactagctttgggacttggggcaagtttcttacctccctccagcatagcttccccatgtatgattcagtggggcagaaccattatgtccacaactcaaacagcttgcctcaacagctggtgacttatttgtcaccatgagcatgattttaaaggaaagcctgattgaccacttggtgaccctaagaactagctgttgtctaatgctctcagattccatgggcctttctcacacgtgtcatttcatatcatgaccatgacaatccagccaaggaggtacctggatttccattttacagacatgattaggccaaagtgactttaccaccaagcccagggtgccatgatcagagattgagaacattatcccaggcctggctgataccaagtctattgtcttgccaggacacaggccgctcctctgtcagtgatgcttcagcgggagatttttttttttttttttttttttttttttttttgagaggagtcttgctctgtcgcccaggctggagtgcagtggctccatcttggctcattgcaacctccgcctcccgggttcaagcgattctcttgcctcagcctcccgagtagctgggattacaggtgcccaccaccaggcccagctaatttttgtatttttagtaaagatggggtttcaccatgttggccaggctggtctcgaactgctgaccttgtgatccacccgcttcggcctcccaaggttctgggattacaggcgtgagccaccgcgcccagcctcagagggaggttcttgaaccagggaactgaccagcatgatgagttctaaggtctgggcttttagcaataaatgaggagtctggataaaaacaggagttctaaaaacttctcgtagcaaaaaagatcccctcgcttcaaaggaaatctaatgtagaatgccaacatatgaaatagatccttgtagcatccctctggttgaaaaagagacggcatccacccaaatgtccatcaactgacaaatgaatactaaatgtggtctatccatctcttggaatattattcagctgtaaaaaggaatgaagtactgacacaagccacaacaagggtgaacttcgaaaatattatactaagtgaaagaagccaatcacaaaagactgcatagggtatgattctattcagatgaaatatccaggatagctaaatctgcagagacagaaagcagactgttggttgccgggaagtggggggagggggaatggagagtgattgcttgatggtttccttttggagtggcaaaacgctgtggagctagtggtgacggttgcacgactttgtgaatgtactaaatgccacggaattgtgcgcttttaaatggttcattgtatcacatgtgaattttacctccatttatataacgtttccagaatcctaccccataagcttcctgcttcgcatgtccctacagagcctccacggaaccttggtaagaaaatcaattgagtcactagatattacaaaatgctaccttagccaaaatagttcacatatgacagatgttttcctccttcaggagccaaaggtaatttctcctaacacatgaaataaatatcagccagtgacatcttgctacctggaaacagaaccttgcattggtaaccagctccaatgtcgattctagtccacagtcatcaagcagcttcatttttaggatacatcattgattttaaactaaaaaatctgctttaagtataccaggaaagagaataataactaagcattgttttttctttcatgtccagtagatactttctttcttttttattttcttttttgagacagagtctcgctctgttgccaggccggagtgcagtggtgtgatcttggctcactgcaacctctgcctcccgggttcaagcgattcttctgcctcagcctcccgagtagctgggactacagacatgcaccaccatgcctggctaatttttttttgtatttttagtagagacagggtttcaccatattggccaggctggtctcaaactcctgaccttgtgatctgctgttgagtggtaaactcagcattatcaagcacttaccatacattaaaagtttttctcacttatttttatttttatttattttttgagacacagtctcactctgtcacccaggctggagggtagtggcacgatctcggctcactgcaacctccacctcccaggttcaagcgattctcctgcctcagcctctcaagtagctgggattataggcatgcaccaccatgcccagctaatttttgtatttttagtagagatggggtttcaccatgttggccaggctggtcttgaactcctgacctcaagtaatccgcccaccttggcctcccaaagtgctgggattacaggtgtgagccaccgtgcccggcctctcattgtttatttgaacatcattatccccattttatagaaaagattatgaggctcaaaacagctatgcaacatctccaaggactcaccaccagttggtgacagagtcaggattggaatctcaggtttttcagctccagagaaggcaccctcgaatatgccaaggtgggtgtcagcagagtcaagttcttcccccggtagactgcctgaggactgctttcagtcccaccaagaaactgaccctaggctacaagacccagagttcagggagatgcatgatgcatgcacacgggtctggggctccttctgaggactcctctgcacctgtccagggcagtctggggagatgaggagtttgggggatctactttttatctttagtctgtgtgaggaagtgaagacccgcctcagcagtcttgctgacaaactgttctcaagaaataactaatgatggacagaaacttcagatcctcttttgctaaagagttgaagggaaaggctgggattccatttgtttttttcaaaaaataggtcagattctgtgcaaacgctagaaaccctggcttctaaaggtaacttctagcctggaagtctacataacatcattttatgcagttggagtgacatagtctcagatttggacacaggattcagcactacaacactgtgcagcataaatcaggtaatttttcaacttattctgaaacatttctacgcaaaggagttgagaataatttcagccttttcctctgcatggtaagtttatcaaaatgatcataatcccttacatataaacacactttatggattacaaagtactttcatggataatccttgctgagttaaaaacaaaaggtgaaattaagaaaaaatatcagtaaatggcgttagctattatcatatatctttacattgtaggtaagaagaggatgagatgaaagggttttatattagaataaaagtcaagttccaacttctaactgttcctggttatcaataaaaaagtcaatgctttttaaattaaaaatgaggtgctgctatttatgacttgataagttgtaaaatgcctttcctatccttcccaatggtcctatgccccattattaaattttaggcctgcagctcatatagatgacatagaatgcagctcctatggattaactggcgtaggtaaagaaaagcaactagaacaagaaaaataaaactaaatgtgtttcaatgtcatttaatgaaaatacagtagaacgcttctaccccttcatgtttaggtggcacagcttaaaaagactcaggccatacaagggctcttgaacttcttgctcccaataaaggaataagaatgctgatgtgtctcaaaaagtgggcgaatgatatgaacagacacttctcaaaagaagacatttacgcatccaacaaagatatgaaaaaaagctcatcatcactggtcattagagaaatgcaaatcaaaaccccaatgagataccatctcacgccagttagaatggcgatcattaaaaagtcaggaaacaacagatgctggagagaatgtggagaaataggaacacttttacactgttggtgggagtgtaaattagttcaactattgtggaagacagtgtggcgattcctcaaggatctagaaccagaaataccatttggcccagcaatcccattactgggtatatacccaaaggattgtaaatctttctactataaagacacatgcacacgtatgtttattgcagcactagtcacaatagcaaagacttggaaccaaagcaaatgcccatcaatgatagactggataaagaaaatgtggccggccagccgccccatccgggagggaggtgggggggtcagccccccgcccggtcagccgccccgtccgggagggaggtgggggggtcagccccccgcccggccagccgccccgtccgggagggaggtgggggggtcagccccccgcccggccagccgccccgtccgggagggaggtaggggggtcagccccccgcccggccagccgccccgtcccggagggaggtgggggggtcagccccccgcccggccagccgccccgtccgggagggaggtggggggggggtcagcccccctgcccggccagccgccccgtccaggagatgaggggcgcctctgcccggccgcccctactgggaagtgaggagcccctctgcccggccagccgccccgtccgggagggaggtgggggggtcagccccccgcccggccagccgccccgtccgggagggaggtggggggggtcagcccccccgcccggccagccgccccgtccgggaggtgaggggcgcctctgcccggccgcccctactgggaagtgaggagcccctctgcccggccaccaccccgtctgggaggtgtgcccaacagctcattgagaacgggccaggatgacaatggcggctttgtggaatagaaaggtgggaaaggtggggaaaagattgagaaatcggatggttgccgtgtctgtgtagaaagaagtagacatgggagacttttcattttgttctgcactaagaaaaattcctctgccttgggaaaaaaaaaaaaaaagaaaatgtggcatatatacaccatggaatactatgcagccataaaaaagaatgagttcatgtcctttgcagggacctgaatgaagctggaaaccgtcattcttagcaaactaacacaaaaacagaaaaccaaacactgcacgttcctactcataagtgggagttgaacaatgagaacacatgagcacagggaggggaacatcacacactggggcctgtcggtgggtggggactaggggagggatagcattaggagaaatacctaatgtagatgacatgttgatgggtgcagcaaatcaccatggcacgtgtatacctatgtaacaaacctatatgttctgcacatgtatcccagaacttaaagtatgaaaaagaaaaaaaaaaaaaaagaatgctgatgtgtcaaagtcatcctaagaaaactgtactgccatgccatactggcataaaaggctacccaaatctccttacagtaccatacgatttctcagaacctaatatctgctgctgagaccaataactattagagaatagatttttgaggaatgagttttattgcagtaattctgaccaaatagcaattaatccattgcttttcccttgggatggctaaagaaggcagctgcagacacatacgtactggtgaacacattatttggctgccatcgggtctgagctgctcagaggacagctttgaagcactgatcggtggaagaagccacacctggtgggattggcccatgcaaactacaggtaaacattctcagccgagtcttgccaacaatggcaatctgtgcctcacacagtcaagaacactcttgacaagaactcagccgggccggcgccatccagcctgactcagactatgaccaatacttcttcagggtaatatttcctgcagggcagtggcactcagccttggctgcacagcagaatcacctagggaacctagaaactttctgtggccaggccttccacccaggccaattaaaatcagcacctctagaagtggaaactctagtattggttttctgaaagctgcccagagggttctaacgtgcagccaagcgtaagaagcactaccatagggtgatatttgggcttgagcccaggtggtgagaagccttggtagaggaacctgcaaaccaccacttgcttggggaagtctgcattcctcccagtcttgaacaattactgacaagtgctttatttgtctgcgctcattagggtcaatctgattcgtctagggatatgagaagtgctatttgagatgcctttgatttttcttcctgaaacattgacacaatgatatgtactcaacacctactttgtgagagcctggaatttggtaaaaacaaaacaacatactcaagtgaaatattcatttctggggtgatttcatggagggagggcgaagcacatatatccaccaacagcgcaatgtaatgtaccactgagtgggtggggacgaagcagaattacaagtgttgtaaatatcatagaactgtcattaaattggccctgccaattttgaaactaaaagtttatactgcaagagtgtaaacatgaagaaaataaaaaggaagcaactcttaccatgtcctagttacctatggccctcttctcctgcattttattgtacttttcctgtgcttgaggatttcaaagagaagcactatgtgtgcaatggtgggcaagtgggaggcctggccttgagggagacagcttcttagaagagatattccgtatggaattctgggttgaaaattcttttctttaagaatgttgaatatggacacaggaaggggaacatcacacactggggcctgttgtggggtcaggggaggggggaaggacagcattaggagatatacctaatgttaaatgacgagttaatgggtgcagcacaccaacatggcacatgtatacatatgtaacaaacctgcacgttgtgcacatgtaccctaaaacttaaagtataataataataaaaaaaaggaagagacattccagatttgataacactcagaaattcatcaacggaagcctatttgtcagattactccggatttgagtcactgattgcttgggggctgatatttataaaacaaagatattttattagaattgtttaagatgtaaatctcactcacaatggtaacaggttccaagaacttacctgcttaggatacgaagccgggttaggaggcagagttgatagaaatgaatgacataaaaaagtacttactgattctctcttttcttcttaagtgggtccatgaggcgcagagtgtctctgatcacagccactttcacttcttcatcaacgaggctggggacattttcaaacacccctggagaaagcttgaacgggtaaggattctgtgtcacagtggagaccgtgattccgtgccaagtggctatccagctagctccaggggttatactagtaaattttgcttatgctaatctatagaagaaaatttttaaagacttcctttatactaccttaagaatgtcgatttccttttataaattaaccaaatacatgaagaggaaaaatagcactatgtttttctaattatcaaaatgatacatgctcactgcaaaaaattaagaaatatagaaaggggttaagaaaactaaaataatccatataatcctctctaaacccaatattgatatctgctgtatttccttccagtttttttaaatgcattttttgggggagggggagaaaaatataaccactgctaaatgtattatttatcttagtgattcaagtatgtcaacatgactaaatcatactcatagaatttcaattagttcatctcctgaggctaattagttcatgtcaaaactgatgggaaggctcagctgcttctaagtttccaaaccttcaacactggaaaaacagcatgctgggaagtgaccacaggtcagataggctttgtattaatagtctatgttgagaactcaacaaaactgaaattatttgacttgaacagaatttggctatgaaaatctgagaatgtccaatcttgttttgttaagtgagcaacatgagggtaggaatattcagctgtatggcaacatagtcaatgagatgctcaaaatacttacttcgtgctcatgttcgattctcatactgggatttgcatttacttcaagtagtataggcttcagatttttcattagaagaatgtcaaagcctaaaatctgggcaggataaacacaattcagaattactgtctctattgagtatggtattagggtcattaagttgaaaataaattcaaactcagtccccaaccttggccttgaccctggcttctcttgtccacagcccctcttcctctgggggtacttgtcagaccaaatggacagcagaaaattttacaggaaccttgataatgggatgagttcccacagtgcgtttcagcactgtctttgtcgtctgaagggctgttgatgacctctttcttctttaacaggttttttattatgttgaggatgagtagtagcccatcaatttctccctctgccttttcttctgctctcgtttactaagtggcttcttagctagctctctgagaacctaaggctgcttttgcaaacctgaggtatacatcagtgtcatataaggaccccgttcaaaaccaccacatcagctgggcttggtggctcattcctgtaatcccagcactttgggaggccgaggcaggcagatcacctgaggtcaggagtttgagaccagcctggccaatgtggcaaaacatcgtttctactaaaaatacaaaaattagctgggtgtcgtggcgcgaatctgtaatcccagctacatggaaggctgaagcaggataattgcttgaacccaggaggtggaggttgcagtgagccaagatggtgccactgcactccagcctaggtgacagaatgagactgtgtctcaaaaaacaaacaaacaaacaaaaaaacccaccacatccctacagagtcagaagtgcttagagcggaacccaggtgaatgtattttaaataaagcaaattccccaggtgattcagatacaccctcttagttaagaagacaggaatattgattaggcacctactaggcacccattactatacaatgcactgattattcatagtctcactgaatcctcatgacagcgtatttgaagaagggattatgtgctccactttacagaagcagaaactgaaactcaggaaggccaatggatttcccagaaaccgcctagctagttaatcaatgacagagctggctttcacacccaagcaggactgactacacaacataaaaatgcagggccctttgttcaaaaaggatgaacagtttcacatagttaaaccaagctcagagcccttctaagcgcagggccctgtgtgacacccctgcacaggtggagttctccaacaccgtctgcttcacgcctgctcttaaatccagcattctgccttgggtgaagctttgtcttccagtcactcgggtttctttctattccttacagctcctacaactggggccagccactcatgagcatctcgttctctctgcctagaacaactcttcatctggataacttttgctcatccttgagatcgctgcccctaatgagattctgattcagacgacaaggactttcgattttccagaggactctcattatggctacagaagtgataatgcagaaaatttctaacataattaatagaaccccaaagtctcaaaaaattaatgtggagaataaagagaaaaaagaaaaagatagggttgtagactccccttctctgtggattcaaggaggaaagatgagggaaatccatttactagtctatatagaatatgcattagttaaatgataattattaaactgtagctccatccttattaatgaaattagagcctgaatgaccatttttgggggctgattcaagatgaagttatttttcaatgaagggcaataaggatgaaaagttgggaaaagtcatcctcactctatttttctttccttggtcatgaaaagaaagaaatggaaattcagtagaaaatgttgcatggattatagatctgcttaataatacatgacaagtggatgtgagtgatgaggccttttagagactctggtgacatcatcagtctaactccagacctggtctgagacatgtgatgttgatgaggctacagagagcagcaggctgtggtgatgacgtttatcatccttagtcatcaactcttactttttggtatattttgtactttctcagcctggtggactcttcccagttcaatgcccagtggtttcatgaatgtgaaggtgggaatgctgggagctggagcaggggtgttaaagcctcatcagccctgtctacacccaccagtggcatgaaattttccagaacctaaacttgagtgcatgtttttgaatatgctgggtcttgtataggaatgctttggagttagaaagacctgggctccaatcccagctcagtcccttacactagctacatgactctaggtaaggtacttagccactctgagcctcaatgatctcatctgaaaaatgaggataacaatagctatctgtcagggttgttgataatggcagtgaaaagcaatacctaggcctatgctcatcatatagaaggtactcaatatatgctatctctttccagtttcctgccaattccaccaaaaagaaatggcattagtgtgctttgtagtcaagaggggctcatttcatatcttagttctgcctttaacttgtgtgactacaggcaagttacttagcagctctaagcccaaatttcctcatctataaaatggaactatgaatgttacttacttaccttagttcatccattcagaaaatatttatttttaatttaatttaatttttttttttttttgagacagagtttctctcttgttgcccaggctggagtgcagtggcaccatctcggctcactgcaacctccgcctcccaggctcaagtgattctgctgcctcagcctcccaagcagctgggattacagacacgtgcccccatgcccagctaatttttgtatttttagtagagacggggtttcaccatcttggccaggctagtctccaactcctgacctcaggtgatccgcctgccttgtcctcccaaagttctgggattacagacgtgagccaccgcgtccggcccagaaaatatttatttaatgctttctatgtcccaagaactattctagctgctggaaatacaacagtgaactaaacaagtcttagactccagtaggggagaaaagatcaaataaagataatgcaatataacattttttgcacagtgcttgatacatagaaagtgcttaatgagagccagctttatgacattttttcacaagttcaaggaaatatgcatgattttcttttcaaaagtccaataaaatatgtagcatcaatggatcttaataaacagaatcacagaactgggagatatgtagagttatcttgtcataaaatcacagaatgtcccagctggcagaaaatcaggtatttacttggtccagtggttttcaaaccggggttcttttctggggtcccaagggagaggccaaccagatcagatcaaatttgaccttttacctatgtgataaactggggttcccaaggaaaaagctttatttatttatttatttatttatttatttatttatttatttattgaaaattcactttgtgcagacaaggaatgtgcagcttagcatggggaaagcctctttccaagtccctctaacggagcaggaattgtaaatggagagcttttcaaccatgtgatattctgcctccccaagtaattaaatcagcaattatgtgttgatcaccttctacttgaggggctccctggggggtttaaagatatctgtccttcattcccgacctctagaagcttcaaatcaagttggggagattcctgagccattaattataaatttatgcaaaggttccaaactacatcctaacagcagtggttcgttcctgagccccacgcctacccttccatctgcatccacagtatccccaactgggaggtcctagagtccacaaattcagcgtatccaaactcactctgtggtcaactgtttctaagatggtcccaatgatccctaactcctggtattcattccttttgtggaatgccccctcgcacacactggggtgtgacctcacctagtaacttgtttctaacagatagaatagggcagaaatgatgaaatgtcacctctaatattgggttataaaaagaccgtggcttctatcttggggggctttctctcactctcttgctcactcactcggagggaggccacctgccatattgtcatgagctgtcccatggagaggcccaggtggcaaggaactgatttctccagccaacagttagagggtacctgagacctgccaacagccatgggagtgggcttggaggaggagctttccccagtcaagttctgagatgactgcagtcctggccaacatgtgggctgcagccttgagagagactttgagccagaagcagtcagttaagcctaaattcctgatccatgtatactgcgagatagtgggtatttgttgttttaagctgttaaggtttggggtaatttgctacacagcaatagataacaaatacaccatatttttctaaaatctcctttgttttctgtattccttatccacccaatcacacaagtcaaaactttcccttcatcccttacaaccaggtggccactaacacctgcacactctactgcctaaaaagctttctagacctggcccatcccctctgcttctactctccacaagtctgtgccacctctcacttttcctctgctctcaaacttgctcctctaattcatctgacacaaggggctgccagagccatttttctaaagtgcaaatagactattaacaatcctttgcccaaaatccgtgtctacaaaatgaagcccaagtcccacagcatgtcctacaaattgctctatggcctgacatctgtcaacactccagctttatctcctcccacttactattactacacatcttgggctctcattgtgctgaaacattagtagttcaaggatgctttagtgctctctgccttcatacttttctgcctgaaggcattacttactttgtgaattatttactgggcactactagataccaggcactgttcttggcactgagcataaagcagtgataaaacaaaactcctacccccttgtagcttatgttttagatgggagagataccacaagcaagtcaataatgaaagcaaggtaagaacacagagtgtgatacagtgggtggaggagagcatttggtgatctacctaggagggccaggggggcctttcttttttcattttttttcacagcaaaataagttttttattgaaaaagataaattcagagaatgagatttggattccagttctaatacaaacactggacaggtatacttgagtgaaacaccttaccattgcagtaacccatctccagactataaaataaggaaatatcctcgtgccttacctctttcatagtaaggactgaaacaagtaaaccaagggaaagcactttgtgaactgtaggaaaagcaccaaaagctctgattatagtaatgtcagttcctattagctctccactaacctagatccagcagctctgcagttgaaccagctaccttcccacccacctcacatgcagccctccagatagattctgtggttttctagttgaccatacttgtaagaacctcagattcctcctgtccaccagtatgagtcttgtctagttctaccatttgacccaaccatcccattactgggtatatacctaaaggatgataaatcatgctgctataaagacacatgcacatgtatgtttattgtggcactattcacaatagcaaagacttggaaccaacacaaatgtccatcaatgatagactggattaagaaaatgtggcacatatacgccatggaatactatgcagccataaaaaagggaggcctttctaaagaggagacacttgtcattctattgtctctggccagaacagtttctgatgagaacattgtggttattctttgttcttctgaacatagtgtatcttttctttctgactgcttttaagattttctgatcatcactggttttccaatagtgtgattataatctggggggagtgtgtgtgtctgtgcatgtgtgtgtattttacttggaatgtcttgagcttcttagattgtgggtttatagttttttttcaaatttggaaaattttggccattatttcttcaaaagtttttttttttttaaatattccctctctcttctgccctgggacttcaattacacatatgttagaccacctgatattggaccatagtccactgagggtctgttcttttttttccttgtcatttttctctacttaattttggacacattctattgctacgtcttcaagttcactgatgatttcttcttcagtgtctaatttgctgttaatcacatccagtgatattttcatctcagagattatattttctgttatagaagtttcatttggctcttttcactagtttccatttctctcttcactaagctcatatgttccttaaaatttgtgtatatagttataatagctgttttagtatccttttcctgctagtttcatcatttctgatatttttggatctgtttctctgaaatgatttccccattggtaaaggttaccttttcctattttgtggaatgtttagagattttttataattgaatgctggacgttgcgatatttcaatgctgagtgtctggactttgtctttcttttaaagtgctgggctttgttttggcagtcagttatttgcaaatcagcctgatgccttcaaagccttttgcttaaggtgaatagcatgggtctagagtaaccttcatcccagggagaatttaaccctcgctgttaaggcagaacttctttggagactccattgcatgctcccagccatcaccaaagactcttcactctgttcggggctcaaatgcctccgtgccctgtgtgagccctggaaatggtttagcttatcagtcccccagttattctttgtccagctttgtggattaaccctccatatatgcatggcctaggactcagcagagacccactgagatctcactcagctttctggagctcttttcctgcttagctccttcctttctgtaattctgccccacaaattccagctaccttagccttcccaaacttcaatcttcaactcctcaactcaatgaggtcactggatgctgtttaggtttacctcctctgtgtccatattccaaaaattgcccccagatgaaaagctgaggcaaccataagactcaccttgttttttcccctttttctcagagatcacagtgctgagctatctgtggtccaaagtctgaaaatgtttctttcatgtacacactcatatatatttctggtagtctagttgtttgcagaaggaggttattgttactccctcatcaccagaagcaaaagtctcagggaggtgacatatggacaggggctaaataaagtgagagaataagtcatttttgggctgggcatggtggctcacacctgtaatcccagcactttgggaggccgaggcgggtggatcacctgaggtcaggagttcaagaccagcctcaccaacatggtgaaaccctgtctctactaaaaatattttttaaaaattctctgggcgtggtggcgggtagctgtaatccagctacttgggaggctggggcaggagaatcgcttgaacccaggaggcagaggttgcagtgagtgagtgccattgcactccagcctgggtcaacaagagtgaaactccaactcaaaaaaaaaaaaaaaaaaagaataagtcatgtttgaatagctggggaagagcattccagggagagggaacagcaagaacaaaggcctcttccaaagaatagcaaagagtgagcgaaacggagagtggcggaagatgaggtcagatagacaaggggcagatggcgctgcatcttgtagaccatgagaaggagccaggattgtaagtgcaatgaaaaagccattggagggtttcagtgaggaaagtaactggatccaccttgtgttttaaagcatctccttggctacagtgagaaaaataggctataggcagtaagggtggctatggcagccattcaagtgcgaggtgatggctgcctagactgggatggcaacagtggagttggttagaagcggttacatttgggaatattttaaaggatatttgcaagagttgcttatggattggatgtatgaaggagggaaacagaaaaaagaaggatgtctcaggctgttggtctgagtgactgactgaatgccatttgtttactgaaacagtaaagacgatagagagtaggtttgggaaggaagtcaagagcttgactttggacgtgttcagtgtttgatggctattaactatccaagtagaaaattaaagtgggcactgggatataccaatctggagctcaaggaaaggtcaggactggaaatacagctataggcgccagtagcgtagagctggtgcttaaggccatgggggctacgcgggatcatttaggagtgattgtgaatagggggacacctttccaaggatggaggcctgagactctccaacactgacaggtccagaagaagaggctgagaagcagcagccagggaggtaggagggaaactggagtgtatccttctatcatattctgcttggcaaacccttcttcatgctttacgctccagcttaagcatctcctcctctgggaagccttccctgacagggttaggcaaagttagcgactcccttttctgggctctcccagcatcccacatggaccctctcatagcatttctttcttacaagggactggagttctcatgagtcagctctccccattacactgtgtgccccctcagagcagggaccttgtcttatccataaccacatgcccatactagctcagggcttgtcttagtgggtgcccagggaatgtgttagagtccaaaggaagaaaaagctgaaatatcagaagttgtttctggagaaagggtttatctaggaggtggggcttgaatagcaccttagaaggcgttgaagttcaagaaacagcaagaatgagagagagcatgccaggtcagccgagacagaagagaatcaaagggcagcaatgggaaagcacaaattatgtccaagacagcaattggatctgtttttcaagactgcagagctcagggagggtacagggaagctagactggggttggggtcaggggtgacaaatgccaggctaaggagatggttttcaaactatactccttggaacacttgtgttcctgttaggtttaaaatgtgaatatttcatggtttcttacaactttaaggcacttcatcatagacaaatttgagagctgttgtggttacagataacaaacaatggaataaacataaaaactgtcatttattaagtgattcctatgtgttaggtgctgtgctaaatattcttcctagtttgctcttatttgtgcttacaataattctgagagggaggtacaaatatggtctctaactgcagataaggaagctgagactaagaattgttaacttgccaagcagaccagctagaggtgccagggttagcccaaacccaggccgtctaagaaccaaatccaagcccttgaccactcactgcattgctccttggccttcttcccttggggtgactggctgaagggtaaggaggaggtcaaaaaaacaaagaataaagaggagaaacatcttaggatttaggaagagcatctccttcaggcatctaagcaaaaggatcatggccaaggagataattagatacagggagctagaagaagatacagaccaagcaatggaactgggaaagaacgttcttgaaagctgagctggaagcctttcctctgcatgtgttatttctgccatatgattcatctacactgagacaggccttgctgtataagtcagagtcacactggtaccctcaagaaggctgacatgaggatatgttgctgggagctacctaggcaatgacaggggacaggctggaatgacagggaagccacgttcctcagcagcagattacaggaaacctgcccacagcctgagcagtgcccgcaactgctctgtgccatcacaatttcccaagtagttattgtggctatgattggaaaggggtcaccgtcacatgtttaagataaatgtaatttctttggctagagtttatgttctggaatgctgcaatctgagtcaagcccaggcaacaagcgagaggggctgtgtggcaaagaagtcatgtgttctatctgcacggaacattacagcttgaaaagccattcacaatctttatctcattggaatttgacaacaaccctttgaggtaggcaaggaagatgaggcacagagaagttaagtgacttatacaagaatacacagcaagtcaatggcagaacctaaccgggtcccttaatctctaggttccaagtcagctcaggtatgtgagacccaaactcaaaagtgttcttacaagtgataagaataaagtaagagagggctccaaggagaaaaggataccattttcttttctttttttttttttttttttttgagactgagtctcgctctgtcacccaggctggagtgcagtggcgcgatctcggctcactgcaagctccgcctcccgggttcacaccattctcctgcctcagcctcccaagtagctgggactacaggtgcctgcctcaacacccggctaattttttgtaattttttttagtaaagatggggtttcaccatgttagccaggatggactcgatctcctgacctcgtgatccgcctgcctcggcctcccaaagtgctgggattacaggcgtgagccaccgcgcccggcccaaggataccattttctcccttaatgactgggaatctgaaatgtatggtaagacaaattccaaatatctaacaccttataccctgtcaaagtgttgtcacccacattacttcacaataaaaggcaggcagggaagtgagcgtaggtgatttacagagaaagaagcagaggctcagagtggtgaagaaacatgcccaagttcgcacagctgggaagaggaaaagcgcttccttgatcctggcgtctccccccatgctcctcctctggcccaggcctggaagcatttagtgtggtcaagcagtgggaaacagtcccaagactgtggttccacttgcagacatgatctgtccaaaccagtggctccctccctgtctgccccctccaccagctccccacagcttgggccccactgatggctgccccatgtggcctgtccatagcaagacatgcagcaaaacaaccagcctggccctccaccctgccactcggtccaagccagggctctgtggcttggctctgcatgccgggcccacatgatagtcctagaatagctgtcattgtcaaacagatctgaccacatggtcccccgggatgacccctggacgtgtccacgttgcaacttatctccttgaccctagctttttgatggcttacgtcaggacttgttttctctggccctacctctaagttcttcccttttctcctttctaatgttttaagccacctacctgatggctgagctgtgcatcctccctgggaaccaaaggccaggggtccagtttctcaggacagatttctgggtggcaattaccccttcctggtactgatcatggcctgaatagccctccaaaaggtgccgccagcctgcctggaaatcctgctggctggcgcctagcccctggggtgtcctctctgggtttgaggctgcactttgggaccagcctcctcttctgctgttgaatgaatgccccatccactagagacactgccccactccctccgttctcacttcttgtcccaagagacctgtcacctgcttgccatagactggaaataacccaaatgttccttgacagaagaactgataataaattgtgcatattcacaatggaatctataacagtgcaaatgaggcagtacccacgacccccaccagcatgggtggaccttggaaaccttatgtgtagtggaaaagaatgttgcagaagacgccatactttataatagcatttttataaaactcaaaaacaagcaaaacaaaacaatatattgtttagggatacattcatgcctaataaaagtattttcaaaagcaaggaaataatcaacataaaattcagggtaatgtctaccccagggctgggcagggacatggtttggggcagaaacacactagttggagatcttgggttgggaggaaggtttgagataatcattttgttgtttggcttcatggcttacaagtatgttccatgtattcttttttcatatatatcaaatgctacaaaatgactttaaggattagatggagagggtcccagaggtaccccttcttctctcctcctacccacactgattgatctgggggcaggaaagtgtgtacctatggagtgtctggacaccacgtctccccaccctgcactgtcacagctgaatggcctgtaagaatgttccagcctcattcccttccctcccacactctggctgagtccaccagactctggccctggctccatcgctctgctgaagacaattctcactgaagtctccagtcaactccttacgagtggagaggacagtttcagtgctggtcttgcccggcgtctcagcagcatttgaagcgctgaccctgtctgcttccccaggcacctcatccttgccattccggctccttctctcctgatatttattctatctcaagacactgcttcttggcctcctttcctggctccctccccctcccctgcctttcccttagtgaaatgtgattcccacaggtgtcttctcagtcttctcgtcaccctctttggtcaccatttgctgatgagttctcatctctgtccccaacccaggcctctgtctcctgaactccaagctccaaatagccaattgtccccttaatctctccacttggatgtcacataggcactttaagtccaactcccaaccttcccccaacagcctggtcctcttccggggcctccatccatgcaagtacccaagccacctgcacatcagcctcaggttctccctgccctcactgccaccatctctcctctctctccagcctcatccagtcaccaagctgagcccttcttgctccttccctggcacccagatctgtctatcccccctaccttcaccacaaccttcccagtccataccaccatcctctccagcttatgtgaaagcaactgtctcctagggacctccccacttccagccttgtctcagtgtgttctctactctgtagacactgttctttgaaacatacaaattggaatgcatctttcccctgcttaaaattctccagggaccacccccccgaaccaatacccaggctctcgacacagcccctacctttctctcccacctcaccttccctcatctcccccgcatctctgccttaaaccccacccagcaaccatactcaacctcttccagtgcctcctgcttcccactcacccctctggcttcagcacatttccacctggaaccctttgcctcccctacccctacccagtttctcctgcttcatctaactctcgctccaggtttcagttcaactgctatttcttctgggaagccttccctgaccacgccactcccgcccagagaatgttacgtggccccacgatctcagcacctcagacgtttcttattctactctagcatttaaaaccctccataatcattgctttttaaattatatgtctctcacaacagactctatgcatcagcaagcaaggccctgacttgctgtctcaatagaacccaggacaatgtctgaccgctactaagcatgtggcaaaggttgttgaatgagtaagtgaatgaatgaatgagtaaacgaatgaatgtaaaactctgctttacatgtgttatctcatttaattcttacaagaaccttttaagataggtattcttcatttcattttacaggtaacagaggggaagtagcttgccccaaatcacacagggagcaaacagaaagcttggaagttgggcccaggtttaacacccaagcccacagcaccaccaacactgtcccctcctctggccatcccaccccgatcactcatcctacacgaagccagagagccctcttgaggccggtcaaggctggaaacgcaggctgggaactggcaatggttacctggaagcacgtggggcccggcctccccgtggggatgtctgactggtagaagactttgagctctggagtcagcgcgatgaccgtcttaatcaccacggagatgatgtcagaccagaccttcttgatgtcaacgcctttggaagacagtctacaaaggatgctggaaaaagtccttttgctgccagtgctagcactgtccgagtggatgaagttgccgctgtggatgttcagtgaatagttggttaagtgcataaagatgcggtgcaggtttttgggggtgggctcctgatatggctcggtacaaaacctagagagtccgtctttggctatataaatctctaaggggtctaaggacttgagtaagacatacagacgaatatcaaacttgagcttgtcgataaggagaggtttgcagatgtactcctggaccaccgctggcctgctctggagggtccctgccaggcggatgtcactggggtctttaatgaggtagattccatcaccctgacaaccaccatcaggtttcacgataaaagtgggcttccaggaggggtcatcgtctttcaccatttgaacctggagggggaaaaaaggatggccgacattatattgttttccctctggatccctaacacagagcaaggccttagcaaatgtgtggtgaatgagtgacaagatgatccctgccgatctgagcaggggctgagcatcttccatggagatgacactgcacaaggtactgagatggtgacatcaggactgtccccagtcttgtgctccagagcgaggtggagagtgtagtggactggcagtcacaagacctgggttcaaatcctgtttcgccagttattagctaccactttgaacaggtcatataactaataatagtgctgagaatgataatgatggtgagctaatatcatttatgagcgcctgtgaaatgccaggcactatatcaggcacttacctaattagctcatctaaccctcacagaaaatatggttgtgtctttttatgtcaggaacagagagggtacagcagttgctgagggcatgggtgttggagtcagatggcctgggctcagacactggccctgctccttaccctgcagccttggacaagtgacttaagttatctacaccctttccatctgtgaaataggagaaaggttgttttgaggattaaatgcaatcataaatgcaagaggctaaggacctagaacctgagaaataaaagacaatccaaagcctggctgtcactctttttagaagatgaagtgacttgccagctaacgcgggggcagaattgggattggaatctagattgatgactgaagcccttggaccttcctctatcctaccatgtcttggtttcctcactttaaaaatggggatatagacacctaccctcactgtgtcgttgtaaggatgaaataaactaaaacgtacaaagggccaagcgcaacaccaaacacagagctgagctagtgcacaggaaatgtttgttttatgtttacatcccttctaaagttcatctggtagacctgaccaatccttccatctgttgagatctttttgaaacaagatcccgtcgtccacagtatttgctctcctcccagctccaggtcagcagaacactcacataattaactatccaggcacttgaccagtccagatagtcgatctggacctgtgggtctgcataattcatcctcgccccattgcccctgatgctggtgaggtgcttcctgcagctatggagagcggatggactgaaatggcaggagaggaggttttcacaagcagagagaagctggaggaaatgtaagggtggatttgaaagagggatccatgctctctgcagcttctggtgtgaaagttcccctctgaaatctgacagcagtgcctggcaggctgagttggtgggtgccccagtgacagactcctctcagctctccacctttgctgtgtaagcccaagccaggacatctgcactctggcttgtgccttgcgcttatctctttgaccagcctatatttctaaataaagcttttgccaattccttgggcactatcacttattctgggcttgtaaaagatctttaacaatggagaaacacttaaagccttaataatggtccacatcaattgtttccccttgtcagcaggatccgagaatggaacttcacaagagatcaatgcaagcctcccagggccttccactgaggctttcttgcaactgtgaccttgacgtttatgtagttatttaatattcaaccaaagcattcgtacacttggccctttacagtaaatataagtgtgctggacaaatggcagttatggaccaggaagtgaaaaatgtcaagtttgcactgatgggaaatttttccctctggaaagcttttgctatgccgaagacactaacagttcaatatattatccagagcaatattttctcctttgaattccatgtatatgccttaaataaattaaactacctggtcaatagtctccgtcactcattggattcctgaatacttctgctctttgccagaatagtgccatacaaatcaagattattaatactcatagaatcattgaatttttagaactagaagaatcctcagggatcatcatcacccagtactctcaaaagtcaagggggaaacggaggctcagagaggtgacgtgacttcccttgggtcccacaactggctggcagtatggtcaggatgagaactgaggtctcccgaccccacctcaagtttgcggtgccatttttgcctctaagataaaactgaagatctcttgttcctccgcttactgtaggaaagatcctcctaatgtatcagacagcactgaggtctgtactctggcctcaccctaaagattttggccctgagtatggccatccaggaactatatctgtagatcctgagttggccagactgccccagtttcaaatcttctgtctgggttccttgcttgttaaagcgcaggtgtgatttacaggaaaccctcacaattgttcagaacgtggttcccatagccaccagacccttccgccactactaccctaaaaagagaaacatttttcagaattcatattcactctcctctgaggtttattcaagaatgaccctttcccagcagttattaaagttaaaaagtaacacgttggctcttaaaaagaagtcatggaccagaatgaaaatatcatcgatattcctgggccccagcctcagcaattctgatttaatcgatctgagatgagacctgggcatgtgtattctggaaaaatcaccgcaggtgattctgatgagcactctgtctgagaatcactagactaagtgaattaaataaaaataccatctgaaaccaacatattgaatgaagtattctgcactggtgttagctggagtgtgaggaagactcgcgcttatgctacaactgatggtatctctagttttatccaaacctgctgttggacctgaaatccattaccttgtaacggtatacacggatggctgaaagagatacacagaggaggtggtggcctaattgcctggcactccgcgggcctactgaaaactttatgtggcttttactgccccctagtggacatttagaaaccgctactgggaaagtcaccccgttcaaaattccaacactactgagcagtaagatactctactaagacattaaaatggtcttaaagaaacaccactacaaatgaaatattattcagccttaagaaggaaagaaattctcacacatggcacaaaatggatgcatcctgaggatactatgctaagtgaaataaactagacccaaaaagacaaatactgtaagtaagaatgcacttatatgaggtacctagagcagtcaaattcatagagacagaaattacaatggtgttttccagggctggggtgggagggaatggagaattaatgattattgggtacagagtttcagttttgcaagataaaataagttctggacatggatgatagttgtacaaaaatgtgaatgtacttaatgccactgtacacttaacatacatacaatgtacatttaaaaatggttaatctggtaaatcttgtcatgtatattttaccaaaattttaagattaatttttaatttttttaagtcatagcttttggtaagttagagatagtactatagtgaaaaacagaaaatctggattttagtcccaattgtttctgactgtgtgacctcgagaaagtcacctaactttctgggctttgttgtagtcacctataaaataaaggggtcagactaaggtccctggcttccgccagcgagcaaatgctgaaccatgatttatcttgatatcaccacagtcgaaggctgcgttacaaacacacaagtggcattcatcacgtcggagagttcctgctgtgctgttgggatcagcacattgggatgatctataagaggaggagatttgggtctgagatttatgatgcatttgaggaaatcagcagggcatttggaggaagcaagctaaaatgtttggagggagaaattcagcaactagaatatcaagccacaaaacattattagcaatgaggggcaggtaagaggccaatttctgaagaaatactgtgtctgcaatactggggaagtcaaaaccagttagggcagtcctttgtcactcaggtggatttgcatccaatcttagcaactcagacctttgatgtcacaggtacacgctacagatctcaggcaaaaacaagcctctggtagacaaaatcagtgtcacacggtgcatgccagacaggaggcagggccagcccctgccagcctcagggatatgagcctggtacccagggcaaattcctacctcaatgttcagggcaatttctgagtccacttaagatggaaggcagtctgcagtgaggtcacctagggccagatggaaagggcaagaatggcctgttggggcagagtgggagacagagcagtggggcagaaaggaaggacctgggcagatgatgtgctgcttcggtggggggttatgaaggcaggagcgggcaggacacttctgggaaactgtagatagttccgacggctggagaacataagaggtggagggggtatgcacatggaaatcccactagtgagattggcaggggccagataataccaccaccacgaataataataataacattagcacacgcttactgagcacttattatgggtcaggcactgttctaagcactttggaggtattatctcacttaatcctcacaacaatcctattttacagatagggagagggaggcccagagatgtcaagtaatttgtcaaagattacacagccaataggtcacaaaggcaggatttgaacccaggcaggcagattccagagcccatgccagaatgaatgagagatgtatgagaaggggatggaggaagatcaggcctagctaggaagtaagagtctcatagggaaggcccttgaatgttggtttagagtttgagcaatgtcctaaaatgatggggactccctgaaaggttttgagaagaaagcaacttaattagatgtgtattatgggatgatgcctcaggctgtcacatagaaaatttacccaagtggttggatggtctggggcagacaggaaaagtccaaactgaggctgcagtggagtcagagggaaggacagaggtttgggaaatattttggagctaaaatcaacaaaactggatgactgggagagagagacaggaacataaaggataatccccctatgtctaggtagtcacagggaatataagggaatgaggaaaggcagaggggaggcagtgggaagatgatgagctgcacagaggaccctggagggcacgcacctagagaggtttgtggtccctgggaaatgtgtctggagcttgggagagagatctggggtcgtcaggcccccaaggatggccaaggccctcgcaatgggccagattatccagagacaggatagagaggaagaagagggcacctgggagccagaggctggaacgggcagaacagaccccaaacaccctgtatttatactcgatctgcaggcgaaggatggagtttcaactggcgagggacatgcatccacgcatcaccagggcacccaggaggaagatagtttggaaggaatgaaaccaggtgtaggaaggacccgaggctatcaaaggtccaaaggcctgagctggggcagggacaatgcggttgaaatagggagctgagagaagaggtagaatcagggcacctggtgactggacagatgtgaaaggcgagagaggaaagggtcatgggtgagctcacggtttgggacttcagcaattttgggaggggtgatgttaccattaacagatttagggactacagggagaggagcaggtctcattgaaggaaagtggggacaaggagaggaggaattcacttcatctaatgagtattatttgcacgactccagacagagctaatttaggactttataatatcccgcaagccctctactgttcatcggaaccaggccaggttgtccgatatctcctacagatgattaattctgatacaacaactctcccaagcttggaaagaataagagctgctgtccgacagggatgagactcagactctaaactcagatggcgcatacctcgaactggagcacaggtatccgaacagacctctcaagctccgtggtgagcgcgggaaccacgggcccgtgagaagtagtgcctgccactgtgcaggcaaacattttcagcactccctggcttttgaagagttccagttaagaaaatctaagcagcaaagaaagcaccctgttcggcttatcactgatgagtatcctgagtttactggggcagtggcatcgattacccctgaggatttggggctgaccccctgcatgcactcctcgagtggcctggatggtcctcccttccttggcagccagcaccaatgcaccctggcagtctcacttcctgcccttccctcctgtcctctctcacctctatgcctttacaccggctttccctggacctccaccgacctcctgccctttctttgcctgtaaagctcctgcccatcatctatggtcccttgggaagttccctctgagaactggcctgcaaccctctatacagacatcttttccttcccaaagtccttctccatattgagcttccccatatcttcatgaccagccctttgaggtccaggaaggaatcatcactacacacacacacagacacacacacacatgcacacacatgtatagagtacacacatgcgagcacatgcacacacatgcacacgtacacactttataaacaaagaaactgaggccaaggggcaaggagacttgcccaaggccacacagctagtagcagaaccagaactattagggaaagtatgtgaaaaccacaattacttttgcaccaacctaaataatacattaaatcttctgatatccaaccctaagctctttctaccataattaattcagggatctgaagaaatctttcagaagaaaccttggaataagtactctctttcattctcgttctgaacacatttgtttgctgctattataaattttgatgctctgcaaagatattactttatgtaattgccaactctccactctatggagaatgaggaaattgaggcccagagagtccagtgagaaatctacagtcatctagctagaaggcggaagtaaagcgtcagttctgggccacgctgccctttctttgaagatgttctcaagttcactgtggaggtggacacagcatcacacggctgctcaaggcagctggtgcttctgctcagaaaacttgaggggcaaggaagagcctctccacatgctttaccccaatgccagcctgctgccaatgcaacttaatggaccctgcttttggagaacagcagccttctgtgagccataatctacccatcattagtgagcaacaaaaaagcctctctagaacacgcccgggacactgaaacctgtttgataggaagggccgtcgtaccgtgagactctccattttcctctcaggtcccttctcacaccctgcccctaactgctggagctgaggggagtgagaacacagcctggcgagtcagccctgcctggcctccccactccttccccacagtgcagtcccagccagcctctgtccagccccacctaattcccctaccatgtgggttctaagcccagcttgcttggcctaaagcctagcttcctaaggaccctgggtgacacaggcgcacgtgggggccctcagactgcagcttccctttacctcctccgagtccacatactgggtgtctgcaagcagcagctgcagagagggcgtgggcttcggagtcaggcagacctgggttcagatctcagctcagccacttcctagctgtaggaccttggccaagctacttactccctcttatggtactatttttagcatttcatttaatttgtattaggctgccttggtttcctgatcatcctcctaagtgatcagattcccaggtgaggctcattccaacctacttggagggagtctcagctcctgcctatcctatcctatcctccagtgctcgcccatgggtggctgggacccgtctcctgagactcggctgtttcctgggtctgcctgggtgtcagcctctcatttcccaactcctgggggccaccccatcagagtccagcccacagcctgcctcgtctccctggcccacagcctcattctcctcccccaggtctcctactgagagcccagaagacatcacagctgagcctgcctggaacataacactccactgctgagtaagctccccttgcagctaaaattgtttttccaatagtgaggatttcctgctaatgaactggctacataatcttcagctcacttccgaatgtatacgactggttatagtcacaggcgcttcagatcactgggcccagcttttcctccttccccacaccacagtcctatgtcccttgcagtcctgccataatttacacattaagtcgcttagggtttttttcattttgttttgtttgtttgttttgtttttttgagacaaagtcttgctctgtcacccaggctggagtgcaatggcgtgatctcggctcactgcaacctccgcctcctgggttcaagcgattctcgtgcctcagcctcccgagtagctgggattacaggcacccgccaccacattcggctaatttttgtatttcagtagagacggagtttcactacgttggtcaggctggtctcaaactcctgacctcaagtgatccacccgcctcgacctcccaaagtgctgggattacaggtgtgaggcaccgcacccagcctaaacttttttttttttaatgcaagaatatcaatgtcttattttgcaacactcaaacaaggtgccctccctcccagtgctcttttcgctaaactagcagtattgctcaattgcagtattgagcaattgcagtattgatcagtgccaggcagtgcactaggcacgtcaatatgtatacatgagatctaatcctacaagacaggcaatagcattttcattcacttattcatttgtttgtttgtttattgtcttgctatgttgcccaggctagtctcgaactcctgagctcaagcagtcctcctgccccagcctcccaaagtgctgagattatgggcatgagccactgtacccgacccagaattttcatttttaggctttgtaactagaggtttctccccatattccaagatcctacaaaaaagtggcagagttaactacactgctaactccttgaagacaggggcagtatttccctcatccctcgattctcttgcccactacatccccagctatcactggaagagccttaatggaggcggactcagtaaatgcttatgggaacccacctctgtctcatttggttcaatgctgtcatgttctatccaggatcacaggtgacatttcttcaaacgctaatcctgggtgatgccaaccacttcctggacttcagttaaagtatgccccaaaagcagataactccccactctctatctctggagcgtacctctcttgggctccagactcatacaatgagatatgtcaaatatgacacgtccaaaactaagctcattgtcttttctctcaaatctacccctcctgtgttccctctaacagtaaacattaccaccatccatccatgtccccaagccagagatctgagatcaccttctcccacatcactcacccccacccagtcatcaaattgacatttctccatctgaacacaccttacagtccctgaatcgtctcagcatttctcacctgaattgctgcaatagcttcctaggtgacctgactgcagtacaagctctgtgctgggcacttcccatacattagtttccattctaataagcaaccctgtgagataggcattaaagggtgagccacatcaaactgtcatttttataagccaaacccagctacacacacacccacacacgtgcgcgtgcacacatttgcatgtgattcaacctcatactattattattacccaccagcccccatcacaggcaaggaaactgagatttacagggtaatttatttccccaatcacacattttataccctggggagccaggatctgaacatgggtgtgtgttcaaatttccaaaggccacactttttctgctaaatcatatcatcttcaggtccacatatcagttcctagaagaatgctcacagccctaaatacattacttagagtattaatacatcttaatacttttattagaggtgtttgaaccagagccactccatcttaaataggatctgggtagaatgaggctaaaacctactgtgctgcattcgcagaaggtgaaggcattctaagtcacaggatgagacaggaggtcagcacaatatacaggtcataaagaccttggtgatggctgggtgcagtggctcacgcctgtaatcccaggactttgagaggccgaggcaggcggatcacgaggtcaggagatgaagaccatcctgcctaacacggtgaaaccccatctctactaaaaatacaaaaatattagccagatgtggtggcgggcacctgtagtcccagctactctggaggctgaggcaggagaatggtgtgaacccagtaggcggagcttgcagtgagccgagatctcaccactgcactccagcctgggtgacagagtgagactccgtcgcaaaaaaaaaaaaaaaaaaaaaaaaaagaccttgctgataaaacagcttgctgtcaagaagccagctgaaacccaccaaaaccaagatggcaacaagagtgacctctggtcatcctcactgctacactcccaccagcgccatgacagtttacaaatggcatggcaacgtcaggaagttacactatatggtctaaaaatggaggcatgaataatccaccctttgtttagcatgtcatcaagaaccataaaatgggcaaccagctgccctcggggctgttgtatggagaagccattcttttatttgtctactttcttaataaacttgcatccactttactttacggacttgccctgaattctttcttgcacgagatacaagaaccctctcctggggtctggatcaggacccgtttctggttacactttaaaatgttattaacagtaatacataacagtaacaactaccatttatgggcacctataaggtgccttacaatagttatttcacttaatctccacagctaagttatgagaaatctactgatattggtttttttctttttcaggttttgttttgttttgttcttcagtaccttgtttgtgtgtatgtgtgtgcaacactgttttttggtttttgttttcttgacatggagtctcactcgtcgcccaggctggagtgcaatggcgtgatctcggctcattgcaactgcggcctccgaggttcaagtgactctcctgcctcaggctcccgagtagctgggattacaggcgtgcaccaacacacctggccaatttttgtatttttagtagagacggggtttccccacgttggacaggctggtctccaactcctgacctcaggtgatccacccaccttggccttccaaagtgttgggattacaggcttccaggcgtgagccaccgcacccagctgcaacactgttcttaataatgttacaaataaggatctgagactgagcaaagccaggtgacctgcagatcacacaggaggtggtgagccaagaggcagggggtgggaatcatgaagggggaagggggggcgggacagggaagctaagcctacttcaggggtcaaggtcgccaagatggacactcgccctgagtcccagcggcacagcctgtgcttggatcaggttcacaagcccagggtgggcagagacagcagtgcagagctggtgcttctgggcaacagctctgacctctaaagagaactggctggaaaccaacacaccaagaggatagttttaaacacccacccagccactcagagagcctggtcagggcagccaaatgcctgcccaggaacgggacactcagcctgatcatttacaccatgagagtgagaacaagatctgctgcaagcctctggatttcaactgctggtttaaatttcaaggagaagcacgaaggtgttgacatgtaaggaattacttgtacatgcctttgatcaccctaaaactccagggtgttctaaatgagtgtgctggttggaagccaagctgagctgagttctacaaaggaactcctactgtgccactggaggctgctacagaagccacgtttccttaaatcaacactgcctgtttccccaactttcatttcaatggcatcaggtggccacgggaaaacaggaccttgggctaagccccctctcatgggctcccaggaaatgttagcccggcacctgcttcctgacctctggccagtcacttcacctgggtgttcatttgcaaggaaacctctctgcttccttaataaatcagagagggacactgaaggcagcctctctttggggaaacagatgccccgactgctcttccaaatttactttccctttggggatatctcgctagccactaccacgaccacaacggtcttaggacagggagggaagttttgataccctttaatgctctggacaacacctgggctccaactctttccttaggcccctgtagccatagacatagcttctgagattttattaatgactcaaggagaggagaagggaaataaatacagagaaaagcactgataattgtgtttacaggatactctcatctcagcatgacaaagctctttagtttgctcttagatggcagaggcaatgttttcccatcccctgggaaaacatccagattccctggaggctcagctttaagagatctccagtggctgggtgcggtggctcatgcctgtaatcccagcactttgggaggctgaggcaggcggatcacgaggtcaagagatcgagaccatcctggccaacatggtgaaacccccgtctctactaaaactacaaaaattagctgggcgtggtggcgcatgcctatagtcccagctacttgggaggctgaggcagaagaatctcttgaacctgggaggtggaggttgcagtgagccgagagcacaccactgcactccagcctggcaacagagtgagactctgtctcaaaaaaaaaaaaaaaaaaaagagatccccagcgtgtcgagcctccctgccaacccaccggacattggaaagtccacccagcttaggaaaacctcacctatgacccacaaagacagaacagctatgccacagtctcaacaggacagctatttcaggatgtcaagatagaataccatgagctaaacagccacagaagaaatatgtataagaaatagcaaggtatgtgttactcaatagcatcaatatcttcatctgtcaaagagagatgatcataaaacctctccggtccagcacttcccagacttgcatggtcagggaatgcttttaaaattataatgtacttgggggacatcaataggcactcatacatattcagattaataatgtggactgattataatgtcatatataagatatggtgatatggtgatgttagtcaatggtgacgttagtcaatatatattataacattttagcaattaatctgtgagaccatttacttttttgccttcaactttaatcgaaatatgcatacgttcctttttttttttttttttttgagatggagtctcgcattgtcgcctaggctatagtgcagtggtgcaatctcggctcactgcaacctctgcctcccaggttcaagcgattctccttcctcagcctcctgagcaactgagattacaggcacctgccaccacacccagctaattttcttgtatttttagtagagacagggtttctctatgttggtcaggctggtctcgaactcctgacctcgtgatccacccgcctcagcctcccaaagcgctgggattacaggcatgagccaccgcacccagctgcatacattccttctttatgttttgcctgtatgatgtttaaagtgtctcggccaggcatggtggctcatgcctgtaaaatcccagcactttgggaggccgaggtgggtggatcatgaggtcaggagtttgagactcctgaccaacatagtgaaaccccgtctctactaaaaatacaaaaatacaaaaagtggctgggtgtggtggcacgcacctgtagtcccagctactcaggaggctgaggtgggagaactgcttgaacccaggaggcggaggttgcagtgagccgagaccacgccattacactccagcctggatgacagagtgagactccatctcaaaaaaaaataataaaataaaaataaaaagtacctcatggttatctaaccaaagggtgaaattcaagagcagcagagataaatctggctgattttcctctgataaatcattttgtcctgagcttgaagccctttctggaagatgctccaaacatgtcagactgggggaaggaaagagaaagagaaagaaactaatatgcattgagcatcaggatgctgaatgctttacagcatttttttttttttgagactgggtttcactcttattgcccaggctggagtgcaatggtgcgatctctgttcactgcaacctacacctcccaggttcaagcacttctcctgcctcagcctcccaagtagctggaattacaggcatgcaccaccatgcccagctaattttgtatttttttttagcagagacagtgtttcaccatgttggtcaggctggtctcaaactcctgacctcaggtgatccacccacctcagcctcccaatacagcattcttattaatactctctcgttcatctttccaacgcccttatgagatagcgattatttgagtttgatagactgaaagcagtactgcaaggccacatatgtcaccgtggatggaatcaaatgcagtctggccagccccagggcccaagtctttccatgacaccacgttggcggaggccatggggcagtgagcctcagtgtacctgctcacacttgagtagtctttgccttcctactgtaataaaagctccacaaagacaagaaccacatcagcttggttcagcacaatactctcagtgccaagtacaatgccagagactgaagaaagcccaggagacatggatacaattttggcatttctaaagggttctcataggggctataggtaacacccatgtccctgggatcaagagggcctaactgctcccagagaggacagaaaggaggatgagacacagggagaaacgtgtcaactcaggaatattttaaaagagcagtcctgtcatgtgacaaagtaccttgagaaatagtaaattgcccgtttctgaagatgatcaagtacaggctggagcctgatcatctgtccgggtgcggaggggattcactcggcgggggagtggcctggatggtctctcaggtcctttccaacccctaagattaggttatttgttggtactgacttcaactcaaggcccaattagtgtctgacttgctatgtgactcagccaagtctctttccctctctgggtctcagtttccttatctgtacgatggaggcatctgtatgaataaccccattgataattctgctcagggcttccaagatcctacacactctctaaagaacaagggttatgataaggttgcctgcagggtggcattgggctaagaggtcacaaaccttcttgctggtgccctctctgcacacaagttctggctaccctggcaatgaactcaggccacttccccagccaggcagggagacagaccaggtccattctgattcagaaattaagtgggaatcaggcaaaccagtagtattaaacataattctggaatgtgtcaaaaatcaaatgccctccagcaatataacaacatgttcttcaaggaagagagatgaaaatccttctgctccagaaggatccatccgtgtaactcagtggagctggtactgccacctagggagggttttggaaatttccaggggtgtttctcactgtcacaatgtatggaagttattactgggcagaggcctggagtgccacacagacagccatgagctgggcagtcctgccacaccttaataaaggtgaataatctatctgtatataacatgaagacagcctagactctaactccatgttacatataaagtgtttttacaaggttcaaactgagtatcacaatattccaagaatataagaatcatgtaaataagggccaggcacagcggctcacgcctgtaatcccagcactttaggaggccaaggcgggtggatcacttgaggtcaggagttcgagaccagcctggccaacatggtgaaacccctgtctctactaaaaatacaaaaattagccaggcatggtggcgggtgcctgaaatcccaactactcaggaggctgaagcagaagaattgcttgatcccaggaggcagaggctgcagtgagctgagatggcaccactgcactctccagcctgggtaacagagtgagactatctcaaaaaaaaaaaaagaattatgtaaagagagaaattacattttgctttttttttctggatttttttttagtttatttgatatttcagaaacatcacatcactaatgatattgcggaccatggtatttgagtcactcatacaacacccagtgattatataggaaaatagttcaaaatgttacatatgaagaaatattagagagactataataactaatcaaatattgtctcacttttcttatatctaaacttattcattataggtagtggtagcatctgaccactttattatgtcacagagtataacggtgccaaagcatttacttattgaattgtatagcatttcattataaagagcttttctggccacatgtggtggctcacacctgtaatcccagcactttgggaggccaaggcgggaagattacttgaggccaggaggttcaagaccagcctggccatcatgatgaaacctcatctttaataaaaatacaaaaattagccaggtgtggtggcacacgcctgtaattccagctactctggaggctgaggcatgacagtgtcttgaaactgggaggcggaggctgcagtgagccaagatcaagccactccactcctcggtggcagagcgagatactctgtcaaaaaaaaaaaaaaaaaaaaaaaaaaaacttttccttatttttctgctttagcaagcatttagggtggggttgtttttattttaactacatgtataggttgcttatatttcatttcaggatactaaacagaatatcacaaataatttggattaaaagtaggggagagggcactggaatgacacccctgtagcaataagcacacctggcactcatgaaaagaaaccaggctttcttggagaattggctgagtccagggcagggcaggaaaagtataagaaaagcctggaatgtcttgttgtggcagaagtaaaagggtgctcagaaaatgaccctgtctctactaaaaatacaaaaaaattagctgggtgtggtggcggacgcctgtaggaggctgaggcaggagaatcacttgaacccgggaggcagaggttgcagtgagccaagatcacgccgctgcactccagcctgggcaacaagagtgaaattccatctcaaaaaaaaaaaaaaagaaaaaagaaaagaaaaaaaaaaggattcaggcccccatggccaaatctcaaataaatttgagcatcaaaatagatattgatggtaaaatattataacccacagaataaagtaagaatccatgagtgcacactaacaggcatgcacacatacatagatagttaaatcagaaggcaaagctctcccttttagtagaaactcagctaacaaatgcagaagggaagatagaggtagataatcactaattggcaacatcacaataataaccgattcaggcaagaatccttaacagaggtgaagacttggaggcgggggaaagtctgaggagtaacaggacattacgtagtcttaaagtatcttcccacaagatacttactaattagaaaggggaaaatagcaacttttccatgaaaatctggcagacaccaccttagccaaatgattaaagttgacattaccagtaataagacagaaggacatcatgtgcctccagatatgatacccacgagaaaaacacaatgttgcttctgtggtactcctgccaaaaatgtgtatcctggatctaatactgaggaaaccccagacaaacccaaattgaggggcagtgtactaagtagcctgtgctcatcaaaaataccaatgtcatgaaacacaaagaaagactgagaaattcttccagattgaaggagactaaaaagacacaacaaccaaatgtgatgcacaatccaggaccttcttttgctatacattatttggataattgtcaaaatctgaatgggaaacagtcgaccaaataaagagacaacctatggaatgggagaaaatatttgcaaaccagacatctgataaagggttaatatccaaaatatataaggtactcagctcagtagtaagaaaacaaataaccctattaaagaatgggcaaagaatctgaatagatatttgtctaaagaaaacatacaaatggccaatgggatatgaaaaaatgctcagaatcactaatcatcagagaactgcaaattaataacccaatgagctgtcacctgttagaacagctattatcaaaaagacatgatcttggcgatgatgtggagaaaagggaacctttgcacactgttggtgggaaggtaaattagtatggccattatggaaaacaaaaaaactaaaaatagaactacccatcatgatccagaaatcctactgggtttttatccaaaggaaatgaaaccaatatgttgaagagagatccgcactcccgtgcttattgcagcatgatttgcgatagccaagatacggaatcaacctgtgtccgtcgcgggtgaatgaatgaagaaaatgtggcatgtctacacaatggaatatagttcagccttaagaaagaaggaaatcctgtcatttgcaacaacttggatgaacctgaaggacgttaagcgaaataagccaggcacagaaagacaaatactgcatgatctcacttatctgtggaatctaaataagttgaacacacagaagtagagaatagaatgagggttaccaggggctaggggcattggggagctatttgtcaaaggatacaaaatttcagttagattagaggaataagttcaagagatctattgtacaacatggtgagtatagttaataacaatgtattgtattcttgaaaattgctactaagagagtagatattaagtgttctcaccacaaacaaaaatgatatatatgtgaggtaatctgcatgttaattagctcaatttagccattccataatgtatgcatatttcaaaacaacatgttgtacatgataaatacatacattttttatttgccaattaaatatttattttaacataacaaaatgataattttattaagtaaacaataaaaatacaaatttattaaaatttaaaaaatttttaatatctactcactgttaacttcaccagcttttttgatgtgaaaatctaataaaatgaatgatgcataaatatttacctgtacattacttattgttctctattctctgtatagtatatatgtagacatatatgtatgtactctatataccataatgtgtacataaacacatttactatataaacactatatataagtagatatacataaagaacacatatatgcacatatataatactatatactgtccagagaagaatgaatgttgtatatatatatatatgactttaaataaaagtttaaaatatatatatgactttgtatacacacatagccattttagtgtctgcttcataaaactatagaataatagagatgtactaatttcaaggggttatatgaatccattccatgatttcagatagttagaaatctaaatccagtccatgaaggctgatctattttcttctttgctatctctagagatggctactatatataattttaataaataatcatataatttcccataaactaaatttaattctctaatatttgtttctctttttccaccttcctctttgtctttgtatctctccaagagaaactgtatcctacgtggtcattaaacctgtataaatagactagtattgagctttattatgtttttcttaacattatttcatgtattaatattgcctctgaagtgccttctaatgtttagttaatctgacagttcattcttccttataaattacctttatcatttaacacaagtctctttcctcttaatcatcatttaatacaactgacacacaatgaaagttgtattaagtgaaaatgaaaaccatgtcgactccctccctttataaaaatgagattcaggtattgcttaaaacgaaaatacatctattttttcttgctgcaattgtaacacccctttagagcctcctcaatgaagtgagattatttcagccctctatctcaggggctggcaaactttggagcgtggttcaagtataccagtgcctgttttgtaaagaaagttttctcatttacgtatggatggtctatgtctgctttcacactccaacagcagagctgagtatttatgacagagactctatgacctacaaagctgaaaagagttactatctggcttttacaggaagtttgccatcctctgcaatggagggacatctaaccattagttatgctgctacaaaaacaagcattcaaatatagtattgttagctgtattgacaaatgtatccaatcgaaggacagctttccatgggcatttgaatattccatatcacatctgtttacatttaataggttatttccaaggtaattctctctagaactgaaatctgccaaaatgtcctcaaaatcagagttgtagtttacatgatagttaaaaatatggctttcagtgtctgataggtcatgattcaaagcaagatctgccacctaatggttgttagtacctgctaagtacctagagaggaatgcgtaagcttgggcatggcacttgaactctctaagcctttgatatggttttgctgtgtccctacccaaatctcatcttgaactgtagctcccataattctcacatgtcacaggagggacctggtaggagataattgaatcatggggtcagttttccccatactgttcttgtggtagtgaataagtcttatcagagctgatggttttacaaggagtttctcctttctcatggctctcattctcacttgcctgccaccatgtaagatgtaccttttgccttccgccacgattgtgaggcctccccagacacatggaactatgagtccattaaacctctttttcttaataaattactcagtctcaggtatgtctttatcagtagcatgaaaacagactaatatagccttattttattctccttatttataaaatggaggtaataagagtatccatcttataggtgtaatgtgagaattaaataagaaaaaaagtatataatgtattcacgattatagccagagcatgtgatgtatgccccataactagtgtgtgtttttaaataaccctagtcaatatataaaaaattacaattttaaaatctgaataaattctgaaaatgataatactagatagctgttgatttcatgattttgataatgacactggttatgaaagaaagtgctcttatttttcagaaatacacacagaagtggttaggggtacatataggaacatcatgtatgcaacatactctcaaaaaggagagagacggcagacatcaatgttaacatctggggttgcatggaggatatgtagaaattatttgtattattcttacaatttatcagtaagtccaaaattatgtcaaaataaaaagctaaaagaaaaagaagggatccttaggtccaaacacacagagaagaactgttatcgatatattctagccaaacatatccttttatcttattcttctaatccttctagcaaatgtacagggttaatttcagaaggaaggtgggagaagagggtgcatgtttgcgtgaggggaaaggacaagagaatcctttcattagcaaggccagaaaatttgattacatcacctttctaaattcaaatctctactttgctttgcctttcattagaacccctccaagatacaattacacagaaaagaagttgaacaagaaacagaataggagagatttctttctttctttggagatgaggaaaaagggtagagcagagcaatttttataatttccttttgaaataggcattgaagtcaagattggctctgctcttttctcgtagaaaattagacatctctagtcaagtgactcaggctacatcactaagaacttttgcaaaatgaaatgaaaggacaaaaattgaagggtgaaagatgacctttaacttcctttggggaagcaaggttttcttgacctttaaaatagactgtcccagaaaaatgtttacttctcctactttttctttttaaaagcttgccattagagagagagagaaaaaaaaaagcatattaaagcagtggccctctaatgatcgtattcatctcaaaattccacataataaatcagtacggcaaggtagcaagattgtaatacttgtgatttaaaacattaaatgtattgggggcaaattgaagtttagaaaattaaacaataagctcctagtatgagaagtgttattgcacaggactgtctctggcaggaggaaaaaatacacatacacacacacacacgcacacacacacacacacacacacaccaagttaagccaaacagggatacaattcagtcaaaaagaagtcttagctcttttcttctcctaagtgatctatcatcatataatgagataattcatctcaagatcagatttttattaaaaattaaaatatattcatttccacattttcaaaaagccatgaagacccagaacactttgtctaagcattcttagctccagcttagatttccatttgaaactgcaaatcctttcttaatattcattcatttcacacatacacctgagggtcccctttgtgttgggcactggggagcagaaataaatctgaccagattccagttcctcaagggacccccagtttaacagggagagcagataagtaaatgtccacttagtgaggggatagagtgtgattctcctagcaaacctctgatgctacagatgaggaaattgaggctcagagtaattaacttacccgagggatacacttaggaagtaatgaagaaaggatttcaacccaggtctattctgaccccaaacccttgcctcactgtctctcagcctggaacactgcaaatagcatattttagggtcctataattgagagagtacaggattgggatcagaggacagagtggtcaactatcccacattcaaggcagcaggggtataggaggtggagtaggggaggaagtatcagaaagggccttcacagatttggagacatcggctctgaacaaggatacgtagcaaaggtttgtgcagtgaagaagaggaggaagggtctcccaacagaggaaatggcggcaagggcaacagtcaagaagtgtgagaaccttgatagatatgaatctttctgaatggccttcagaaggagccaacaggaaggatgccttggcttagccaatatctgctagtctcagcgaatcacaccacagggattgtgcaggaatgtgcagatacagcttcagttcctcacctgggagggggtgaagctgagataaaggaattgcgattgcctgggggttgccacagccagccccacagaggcagccataccgtagccttcattattggctgtgatgctgagccccaggctacactgaccccagcattagcaagatgatgatggattacataaagccctttgtgctccaactgaaaccctggcagcagaaacttgtgcagaattttaactccaatgaagagttttatgaaagtccaggaaagccaaacccagagaatcacaaaaaattagaagaaagggatcttagtgaaaatctacaatctcctccttttgcagaagaggcactgaagaagccttggcgggtgggggaaggctagatgacttggccagggtctcatagtcagtgaaaaggtagagtcctgacttgaacctatggtcaggcacgtggctcacacctgtaatcccagtactttgggaggcagaggtgggcagatcacttaaggccaggagttcgagagcagcctggccaacatagcaaaaccctgtctctactaaaaatacaaaaattagctgggcatggtggcgcaggcctgtaatctcagctactcaggaggctgaggcaggaaaattgctcgaacccaggaggcagaggttgcagtgagccgagatcgtaccactgcactccagcctgggagacacagcaagactgtctcaaaaaaataaaaatgaaataaaataaaaagacttgaacctctgtctcctaactccagttcagtgtttcatttcacttgaaatgactgcataggaacttttcctgacttctccaccttcccaccttccccactccatgttatgctggtttccatagtgcctgtgtttaattccatcccagcttggaccatccgtctcctctgctaagcaggacccttcattggaagccaagactatatgttttgtctgactccccagtctgccagggctggacatataaagggcacttagtaaatatttgttcacactaaaggaaactgtgacagagtcagaagatgtgggtcttagtcccagctacatgaacctataggccatgggactgtgggccagttactcaaccctctgaatctcagcttcctcatctataagatgatgaataagaacatgatgtagtggaaagatgacgggatgtagaccctataaatgtccaactgaatgaatgaatggtcaccttcctctaccagaaatcctgagggcaaggggatttctaacttgttttgtatccacagcacttggcacttagcaggcctcgggaaacgattgcactaaaccacataagaatatctgagtacaccagcagttgtataaccgggagcaagtacctgtgattctgatcctttatttcctcatttgtaaatcagagatcatgataccttcccaaactgagtgaagataaaagaggtcatgtatataaaaatcatttggtaaactgcaagcacaacacagatgccagtcgtcatttgggctgtttaaaaggacttcctgatgaacaggacctaagtatgttttccagagaggaaaatatactttccagaggggagcagcatcttgagtttcagatgatatcgttttcccagttaacacattgaactgttaagcaaggggcacaagaacagtataatacatccaagcaggaggtgaagttctatttttggcaacaaaggaaataacactggaagcagatggggaggtgaaaccatggctcctatggagtccttgccagccgctttgaaccatctgccttcttctgacagctggagtcccctcacttctgtctttactcctttactagttatgcgccagaacccagggccactgcatcggcctccagggatgccgtgcttcagaagcaggagacactgcattctccatgttacttcccaggcttactgcagacgtgtgagggcgatgtgtgtggctgaaggttgggtcatcaccagggaaaggctggctggtggccacctggcgctcccaccggacggcatcactttggtaagtttctcatgctccgagcctggcccaccctgttgtgaagtgacaagctgggtcctgcagatacccctggcctcaaagaggctaacttttgatgactaaactcaaaagagacaaaaaaaaaaaaaaaagaaagaaagtaaaccacagcatatgtatattaatttgcaactcaatttggcaaatatatttgagttcctactgtgtgccaggcactgtgataggcactggggagataatgatgaatgaaacccatctggtcactgccttgtggaacttacagtaggagggagaggtaattaaacaggtagtcactagacagtgtaattagcataagtaccatgaaaagaaaaacaacaaggtgttgttgagaacttgctccagacgtcgggggcagagtaggctttatagagaaagttaaagctaagcagggggtccgaaaaactaacaaaattgtcaggtgaaaagcagcagcttggaagtggcagtggggtgcaaagaaagaagatgggtgctccaggcaaaaagaagggcagtcagaggtaagagaggtcttgatgccattgagtatctaataaaaggttaaatatggaaggacccaggaggaagagttcagaaatggggacaagcgtagctgccgaggttggcaagggctctataaggcgtgtgcaggagtttaaactgcatctttttgataaaccagtgggttacccaaagtcggtcaaatcagcacattgtctacaggaaggaaaatgatgtgactaatagatttaccggaaggttatttgataaatgtggaatcaggacaaagaatatacacttcacactgcaagttttctttctgccttgactctgacccacttataatgccacattttcctggttcctaaacccagcggaggacgttgttctctgggggtttttgcaaataatgcacttcattcagccttgaggagctgaatcaataaacactaacttgggatggtaactggagaggaaaatggaagaatctcatgcttgctgcttccctccaagaaactgcaaaacattattgaacaggtttttggctatattcagtgaaaaattcttctgctgagaaatacaaactctttcaccataataaatactgttttgataacaaaactgtacttttctcaaatacccagatggaagaccatatgcaaaataaactctaaggaatttttttattggccatctgctaaaattggaaaggctgcatccgcctcgactcttcacaaaaattttcactgagaatcccactcgcttccgcctggtgccacctgctgatcacatttgagtaccggttttgcaaatgaagagcagggtaacatgggtctccctctttctttaatgaaataaacttaatcctaattaatgtaagaaataacctacaaagtgtcaggttttccgttgttttacagaaactcacacttcttcctgttgttgccaggaaccacaaagcaaagcccctgcatgcacacacctctgagacctcacttctgaggcactgtcaggacattgttttaccctcaggattaagtgcactacctctaataaagccccgtgtttggctttcacccgtcaaaaacgtcaatgcattatattctttagtatgtcaattccactttgagatatctatccaaaggagatgctggcacaggtgtataaagatacctgtgcgaggatattcccttcagcatcatttgttgaaccaaaaaatatgagaatatctcaatgttcatcaacaacagggtgaggctttttttttttttttttgagacccacattacccagactggagtgcagaggtgcgatcttggctcactgcaacctccgtcttcctgtttcaaacaattctcctgcctcagcctcccgagtagctgggattacaggcacccaccaccatgcccagctaatttttgtatttttagtagagaaggggtttcaccatgttggctaggctggtctcgaactcctgaccttgtgatctgcctgtcttggccttccaaagtgctgggattacaggcgtgagccaccgtgcccagccaacagggtaaggatttttaaagtcataatgcatctatgcagcactggcatggcgagatgtcctacgcacattcaatgggagaaaatgaaggctaaagaaaagaatggatagaataatcccatgtttttaaagaaaaaagaagcctttttaaagaaaaaacagctctgtgtgttatagctatatttgtttatacacaggaaaaggttgaaaggatacacactaaacaaaagcaatttctgaagaatggggacttttttctactttttactttcacatgcctatactaattgaatttttactatcaatgcattgtattaaaacaaaggagctactaaaataataatgccactttttttttttttttttttttgagacagagtcttgcactgttgcccaggctggagtgcagtggctcaatctccactcactgcaagctctacctcctgggttcacgtcattcttctgcctcagcctcccgagtagctgggactacaggcgcccgccaccacgcctggctaattttttgtacttttagtagagacgaggtttcaccgtgttagctagggtggtctcaatctcctgacttcatgatctgcccgcctcggcctcccaaagtgctgggattacaggcatgagccaccgcgcccggccagtaataatgccatattcttaaaaaatcaggtttgcagctaataaagtgtttcatcatcacatgcgatgaaatgtgatgctttgcttcagaagcaggagacatggcattcattgcatttcatcatcacagactcactggatgctcacttgctctaaggctaggatcactttcatattcaagagatgaagaaatgggactgagtcgaggagagggaaccaagatcctgtaaggaagagatgatggtgccagggcgctccagcaaatgactactgtggggttttcagagtcttattctgtatgcgccaggccctaaactagcagttttcaaattgacttcactatgtggacaaagaaatcctcctttatattagagaactatccagtcctgaggactttcagcatcaatcaaatgggctttgaaacttcagggcttagaacgctaaagcgggaagaccagagcagtcacctaactcagtctccctgttttactgctgagaaaagagactccccgaacagctaaaatcaggcagtcaatacttgagcaacaaacacttgccatctccaaggagttaactttccttcttctccactaaacccgctcctcctcttgggtttcccatcttggcaaatggtgacccagcagactcctgaaagcaccaagtctgccttcttcttcaccctcaattctatcagtctccaaatcccattgatgccaacttccaaatattactcacctctgatctttctctgcctaagattcctgcctgagtgtctccatacaaccttcagcatctcttctgcctagatgaatagaacagcctttctaataggtctcatttctcctccttcccaatctacgctatcctctccaacagatcacctttctaatactaaaacttgataatatacctctcccctctgcacttaaaacccctgcatggcttccccttgataagcgctttaccttggcattcaagaccctctgtgatctaccctctccttctcaaatctcatctggggtcagatccttttcatttatttttattatttttttgagacaaggtttcactctgtttgcccagactggaatgcagtggcatgatcttggcccactgcagcctcgacctcctgggctcaggtgattctcccacatcagcctcccgagtaggtgggactacagacacataccaccacacccggtaaatcgttcatatttttagtagagacagggtttcgtcatgttgcccaggctggtctcgaactcctggactcaagcaatctgcctgcctcagcctcccagagtgctgggattacaggcatgatacggtttggctgtgtccccacccaaatcttatcttgaattgtagctcctataattcccatgtattgtaggagggacccagtgggagataactgaatcataggggcagtttcccccatactgttctcatggtagtgaataagtctcacaagatctgactgttttataaggggtttcccttttcacttggttctcatagtctctcttgcctgtcaccatataagatgtgcctttcgccttctgccatgattgtgaggcatccccagccatgtggaactgtgagtccattaaacctctttttcttcataaattacccagtcccaggtatgtctttaacagcagcatgaaagcaaactaatacaagctgtaagccgccatgcctgccctaaatccttttctcttaaactttagtgactccacactgctcatcattccaaaatgccatactatttcatgacttcgtacctttgcacaagctattgtttttaggtagaatgctcttctgtggctggtctgccaggtaaactcattatacaaaatcaggtcaggtgtcaccactactcaggaagctttttctctccctctattccatttgccctcagccctgtccaaccctgctccccatcaccaacaaagttttactccttttctctggaacatttctgtaccttatacacacttctatttaaatatcctcccacattattacacagaagggaaaagtactggcactgaagccagtcttccaaactgtgttaaccctgccaaatgacttaacctctctgtacttcagtttcctctcctatgaataatagaagaatcctgcgagggttgctaaagaattttaaattaggtaattgttatggactatatgcttgtgttcccaccccacctctgcattcagatattgaaaccctaacccccaaggggatggttttaagaggtaggctctttggagggcaattagagcatggaggtggaccccacacgatgggactagtgtccttataagaggaggaaggcagctagtcctttctctctaccaggtaggcaaacaatgagaaggtgaccagctataaaccaggaagagggccctcaccagaacccaaccatgctggcatgctgatcttggatttccagccttcgaaactgtgagaaaaaaaagtttgttattcgtcacccagtttatgatattcaattgtagcagcccaaacttcctaaaacagtagtctagataaaaacactcagcaaatgttgctattgttattgttatgtagtcattcttttagagaacttccactttcagccaaagtgtaataacagaaactagattgactcttgccccgcatcgctcgagcaaccaaaaagtagacaaaatatgttaacagttttgaagacctggatatgaagcaacaaaggacagtgattcctgagagataggaattgaacgatgtgaaccctaggattgcctcagattactgccttgagaaagattccaggctgcagtgcagagtgccccagtaggaccttggtgaagcccagtggacgccctgagttgagaaaatggaactgtgagtcagggaagactgagatagccagggttctcaggacagagtactgggaaggacacttttgtacagagaactctggagcgtcttccttaaatgttttgctaggtacagatcagcatgcacgtgaggaaactacccaaggccaaactacctgaaaaacacccccaaaaaagcagaggtagcagtgcctggtgttcacacagagccaggagtagtgtctttctcaccagccagactagaaaacatgattcatggagcactgggtagagcacacataagactgttgcttgagtagtgaggaatagtaagccttagactgagtaccactccagtcctgcttaacaaatcttgaaaatcttgaaatagacctgaaatctatttccaagtaactgaactggatcttacaacaaagttcaagaatatgtgcaggaatatggaaatatccaacatccaaataaggtaagattcactatatctgtcacccagctagaaactcccagacatgaaaaaaacatcgtgatatgggccacaatgaagagaaaaatcaaaaccaactcagaatggacagagttagaattaggagacagtgacattatgagagtgattataatgcattccatatgttcaaaaagttaagtagaaatatggaagatagttaaaaagactcaactctcatgtttagaaataaaaactacaatatgtgagataagagattgaatgggattattcgacaagaatgaaaaaaatgagtgaatgtgaagacaaaacaacagaaactctccaaaatgaaacagaatgatttttttaaatgaacagaacatcagtgaactgtgggacaacttcagatgtactaatatgtacgtaattagagtgaagtagaagtgaagaggcatagaaaaaaaatctgaagaaataatgggcaaatattttccaaattttattaaaattataaacccacaggtccaaaagctcaatgagaaacatgagctttaacatgagaaatataaaagaaaattacatcaagacacatcataatcaaattgttcaacaccaatgataaagaaaaaatattaaaagcagcaagagaaaaagaatgttatataaagaagatcaaaaataaggaagaaaacagatttcttttcagaaacaatataagcaagaagacagaagagcaatatattaaaagtgctgaaagaaaaacaaaatgtccacctagaattctacacctagagaaaatatcatccaaaaccaaaggcaaaataaatttcaagaaatataaaagttgagagaattcatcaccaaaagaccctcactgcatgaaatgctacagaaagttatttacacaaaagaaaaatgatacctgacagaaatgtgaatctacacaaaaaaatacagaacactggaaatggtaaatatatgagtaaatatttaaaattatttcatcttgttatttaaatctctttaaaatagagttgattgttaaaacaaaaatgataacaatgtagtctggagtttataataagtataaaagtaaaatgtataaaaacaacagcataaaagctaggtgtgggaaaatggaagtactatgagtgttataaggttctcatactataaataaaatagtactatataacttaaaggtagattgtgataactcaaaaatgtataccataaattttaaaggaaccactaaaaacaaaacaactatagctattatgccaacaaaggaaatcaataaaactgaaaacttctaaacagactgagcagagggaaaaaaagaaaaataaaaaacacagattacaaatgttaggactaagaggtatcattagtaaaggtaaaggcagattactaaaggtaacattatgaatcattttacaccaatacaagtgaaaacttagaaaaagtagacaaatttcttgaaaacaaactattaaagctcattcaagaagaaatagataatatgaacagcctatatctatcaaagaaattgaatttgtagttaaaagtttcccacaaagaaaataccaagctcacatgatttccctagtgaattttaccaaacatttaaagaaataataccaactctgaaaaaactcttctagaaaatttaaaagtagaaaatattttataattcattctgtgtggccagcattatcctgataacgaaccaaagacattacaaaaaaataaaaataaaaatgcaaaccaatatccctcatgaatatagatgcaaataaagaacattttagtaaatcaaaattccacaatatataaaaaggataatatgttatgactaagtggagtttgtcttagggatgcagggtttgtttaatatttaaaaatcaaccaatgtaactcaaccacattaacaagctaaaaaagaagatccatatgatcatctcagtagacacagggaaaaaaaaaagagtgacaaaatcctacatccattcctaattaaaaacaaacaaaatccatggaaacaagaaataaaaggaaacttcatcaatctgataaagaacatctacaagaaacctacaactaacaacaatacttaatgatgaaagacgaaatccataacccctaagatcaggaaaaagtcccggacatctgttcacaccacttctacttaacattatttggaggttctagccagtgccataaggcaagaaaaagaaataaacggctaattacaaagtaagacaaaaccattcaattctcagaggatgtaatagtccatatagaaaatccagtggaagtacaaaataagctactagaactgttaaataagtttaacaaggttgcaggatacaagatcaatacacaaaaagcaattttatttttacatacaatgaacaattagaaatggaagtttaaaaataaaacactgccaatatatcaaaaattggaaatcataagggaaaattgtgacaaaagatgtgaaatacttgtacgctaaaaactaaaaaacactgttcaaagaaattaaagacctaaataaaaggaaagatacaccatgtcaatgggtcagaagactcattgttaagatgttgattctactcaaagtgatatatagattcagcacaattccattcaaaatcccagtgggcttttttgtagacattgacaagctgattctatatttcatatggctgatcaaagactacaatagccaaaacaactttgaaaaagatgaacaaagttggagagcttacactacctgatttcaaggcttataaagctatatcaaaacagtgaggttttggcagaaagagagacaaatagatcaaagacacagaatacagaattcagaaatatacctacacatatttggataactgtttttgacactggtgcaaaggcaatttggaagagaaagattagtgttctgatcaaatgtttctggaacaactggatattcgtatgcaaaaaagtgaacttcaacccataccttacaccatatacaaaaattaactcaaaatgaatcacagacctaaattcgaaagctaaaactatagaacttttagacaaaaacatagcagaatatctttgtgagcttgggttagatataaattcctatatatgacacaaaaagcatgatctattaaaaaattgataaattggactttgtcaaaattaaaaacttgcttttcaaaggataataagagaatgagaagacatctcacataccccataagtatatgtacctactatgtagacacaaatattaaaaattaaaaaataaaaaaaggcacagactggaagaaaatatttacaattggtatatctcataaacacctgtattcaaaatatataaaaattctcaaagctcaataataaaaataaacaacccaattaaaaaaaaataggcaaaacatgtgaacagacatttcatcaaaaaatatatctggatggcaaacaagcacatgaaaagaaagctccacatcattagtctttaggaagtgcaaaatacaactgatgacaggtcactacatacctattagaatggctaaaattaaaaagactgaccactggccctgtaaggtgacagacaggagcagtggctcacgcctgtaatcccagcacttttggaggccgaggcaggtggatcgcttgagctcaggagttcaagaccagcctgggcaacatggtgaaaccctgtttttacaaaaaatacaaaaattagccaggtgtggtggcctgtgcctgtagttccagctacttgggaggatcgcttgagcctgggagatggaggctgcagtgagctgtgatcgggccactgcactccatcctgggggacagagcaagacccactcttaagtaaataaataaatagactgaccattaccaaattctggcaaagatatggaggaattggaatgttcatacattgttgatgggatgataaaatgacacaactactttggaagacaatactttctttaaaattaaatatgcacctactatatgatccagcaattcaatttttaagcattcacccaggaagaatgaaaacatgtccacgcaaagacttaccacaggtgttcatggtgtatttgtaacagccagaaaactggaatcaacccaaatgtcctgcagcaggtgaaggtctaagcaaactgtggtataaacattcaatagaatactccttggcaatgaagtattgatacatactacaaatatggatgaatctcaaaataactgaaagaagccagacctcccccgaaaaaggagtgcctgttatataatgccatttacataaaattctacaaagtgcaaagttatcttgacagaaagtggatccactgttgcctgatgataggagaggaggaaaagagggaagaagcgaaggaggggctgggcgtggtggctcatgtctataatcccaacaatttgggaggctgaggcaggcggatcacttgaggtcaggagttggagaccagcctggccaacatggtgaaacccatctgtaataaaaatacaaaaattagctggacatggtggcacatacctgtaatctcagctactcaggaggctgaggcaggagaattgcttgaacctgggaggtggaggttgtagtgagccaagatcacgccactgcactccagcctgggcaacagagcaagactccatttcaaaaaaaaaaaaaaaaagaagggaaggacagaaggattacaaagggacacgaggaaaaatttcagcatgatgcatatgttcattatcttgattgtggtgatgatttcacggatttttacatatatgaaatgtataaaactgtacattctaaatatctgtagtttattctatgtcgattatatctcaataaagctgtctgttaaaaagtataagacaactaggctctctgcagagtctcaaaatatctccttactagacacttagtaattaaaaaggaaaaaaatagtaactttatagtggagaaatctagcagacactactttaactaagtgatcaaagttaacatcaccagggataagacatcttgacatcatgtacttagcaacatcactttcatggtgttcttgccaaaaatgtctaatctgaatctaacatgagaaaaatcagacaaatccaaatgtaagttcattctaaaaaaaaaaaaaaaaaaaaaactagccagtcgtattagactgttctcacactgctataaagaaatacctgagactgggtaatttataaagaaaagaggtttaattggatcacagttccacaggctgtacaggaagcatgatggtggcacctgcttggcttctggggaggcttcaggaaactctcaatcgtggcagaaggcaaaaggaaagcaggcacatcttaggttgctggagcaggagcaagagagaaaggagggaggtgctacacacttttaaacaaccagatctcatgagaactctatcactatgcaacaccaaggggggaaatctgtccccatgatccaatcacctcccaccaggcctcacctccaacacaggggaattacaattcaacatgagatttggtggggacacagatccaaactgtatcaccagtactcttcaaaagagtcaaggtcacaaaagacaaagaccagggaaccattacaacctagagaagactggggagaaatgacaactaaatgcaatgagggatcatggagtgaatcctgtaccagaaaaaggacattagtaggacaacaggcaaaatgcaaataaagagcataggttatttcatattatatcaatgttaatttcctagtttcagtcactgtgtaagatgttaacattagaggaagttagatgaagaatttggggtgctctctctgtcctatttttgcaacttttttgttgagttttaaattatttcaaagcagtttaaaaactgaaggcaaaataaagacattttcagacaaatgaaagctgagggaatttgtcaccagcagacctgcactgtgagaaatgtgttgatgcaaattcttgaggccagaggaaaataataccaaatggaatcccagagccattcaaaggaatgaagaatgctggaaatagtaaatacatgagtgagtataaaagacaaatgtactaatcttttagtttctttataggataattgactttttagagcaaaaataataacaatgtattgtgtggtttataatattgttagaagtaaaacagatgacgatagcacaaaggatgagggcgggaatggaactatactgctgtaaggcgctaatatgttacttgaagtatgtaatacttaaaggccaatgtggtaagttaaagatgcattgtaaaccctagatactagggctagggtgaaaactaaaaagatttttaaaagaagtatagctaataagccgaaagaagagataaaataaaacactaaaaatattcaattaatccaacagaataaatagaaaagaaatagtaagatggtagacttgaatccaacagttagtattacatattaagattaactggactaaacacacaaatcaaaaggcagagactgtcaaactgaataaaagaccatactcagtttcatgctgccaacaagaagcactctttaaaaatgcagataggttaaaagtaaaataatggtaaaaagatataccatgcaaatactaagccaaagaaaactggaggtgctaaattaatatcagacaaaatagacttcaggacaagttactgataaaggagtcaaatcatcaagctaataacggagcttcaaaatgcatgaggaaaacactgacagaactaaaaagagaagcagacaatccaaaattaaagctggaaatttcaacactaacttagtaactgatagaactagtaagtagtaaagtagtaaaaaagatgtgaataccaccaatagcaacttggcctaattgacacttataagatgctacatcaacaactccagaatacttattatttcccagggccatgaaacactcatcaagatggacaatgtgtaagccattagaaaactctcaacaaatttaaagagactgagataatacagaatatactctctgatgtcaacaaaattaaattagaaatcatacaaaaaatatttggaaagtccgcaaatgacttaaaaagtaaacaacacatttctacataacccatgggcagaggagaaatcccaagggaaattagagaacattttcaactgaattataatgaaaatgtaacatacaaaaattcctgagatgtatccatagcagtgcctagaaagaaatttgttttaagatttaaaaatcagtgatcttagttttgtagcacagtgcattactcatgtttgtggtgttgcaggtgtcaacaaacctactgcactgccagttgtataaaagtgcagtataatacaattatgcactgtacagaatacttgataatgataataaactactacgttactagcttctgtatttactatagtatactttttattgttattttagagtgtactccttctacttctaaaaaaaaaagttgactgtaggatagcctcaggcaggttcttcaggaggtattccagaagaaagcactgttatcataggatatgacagccctacgcatgttactgctccttgaagaccttccagtgggataagaagtggaggtggaagacagtgatattgatgatcctgaccccgtgtaggcctaggcgaaggtatgtgtttgtgtcttggttttctaacaaaaaattctaaaagtaaaaataattttaacatttaaacatagaaaaaggcttagggaataagaatataaggaaattttttttgtacagctgtacagtgtgtgttttaagctaagtgttattacaaaagagtctaaaaggtttttaaaaaataaaaagtttagaaagtaaaaagttacagtaagctaaggctaatttatcgaagaaaattttttaaaaatagatttagtgtagcctaagtgtacagtgtttctgaagtctgcagtagtataatgtcctaggccttcacattcccttaccattcactcacagactcacccagagcaacttctagtcctgcaagctccattcatgggaagtatcctacataggtgtatcatttttcatcttttatacagtattttcccctttctatgtttagatacaaaaaagacttaccaatattaagtccagtaccatgctatacaggtttgtatcctaggagcgataggctataccgtatagcctggatgtgtaggagcctataccatctaggcttgtgtaagcacactctatggtgttggcacaatgatgaaatcacccaatgacacttttctcagaatgtgtgcccgtcaagtgactcatgactgtagttggatgcaaagctgggaaggaaaggtattccacatagcaacaacagcatgagcagagccacagaagagagacattgggggggggggggtaattatgaggaacagctgagagttatcttttaaaattaactttattgaagcatagtttgcatacaattaaatgcacccattttaagttaatagttcgatgaattttaagcaatgtatataaacccatgtgaccaccatctcagagaaaacttcctttaaaaattatcacttcaagctgtttttgtgtttagtaaatgataattttattacaagttttataattcaatattaaaaccaaaacaatacagaggcaataaaatagactcagaaagcatatgccttggaaatagctctaggttttaaaccttacttctcaagcaagttgctaaatttttcaaagcctcagtttcctcatccataaaatggggataataataaaaccagcctcacaagattgctatgaagattaaaagaaataatgtgggctgggcgtggtggctcatgcctataatcgcagcactttgggaggctgaggcgggcagatcacttgaggtcaggagatcgagaccagcctggccaacatggtgaaacaccatctctaccaaaaatacaaaaaatacaaaaaaaaaaaaaaaaaaagccggtgtggtggcacccgcctgtagtcccagctactcagaaggctgaggcaggagaatggcttgaacccaggaggtggaagctgcagtaagccaagatctcacgactgcactctggcctaggcaacagagcaacactccgtctcaaaaacacaaaaataaaaataaataaaatatgttaaacttctagcacaaagcctggaacatagcaggaccagtaaatggtgttagccttatcacaattagacaggcattggttgtatagtcaccccagagttatgggacagactgtgaaacttgtacacaaaggctttgaaggggtcctaaatgaaactgttaaaaggctaacaaaaatggcagttctgagttccacttcacaatcagtggtgagggctccagtgtattacatgctcaaacctggtgcttcgagatggaatgggtcacttgacaattgattctggaacaagtttaaagcaaaacactgaaaaggttccccatgagtttgtcagacctgctccctggcctttaaacagagcctgacctcccacatctcaggccacaggaagccggcgaggccacggctctaggattcccccagcggccccatcctacttgggggcccagccacctgctccggctccagctccctggctccccagcgtcctgactccatgatccagttttgatatccgccttagggctgtctccttgtgtcaagacccgtttcttcagtttacctacctgtcaccctactcgttcaactctgcaagctgttttgatagctgccaacacctactgtgtactgttaagatgctcccttagtcgcagctccctgggaccccctgtcccagctcccagcacacaggacccaggacacagttgcaagcataatataattcaggggtcatggggacggagtgccatctacctgagcaacaaagagctggaactcgtcaggcagaatccatgagcgagggtagaagttgtactcctcaggaaagagattctgcatggttctcactgctctgctcagagtaattttacgcaccatctccgtcatgcctggggagaagagacgctgtgaggttttaacaacagtgggctactagctataaaacagccattatttgggacttttaaaaccacccacccgacatattctctttttcaggcaggatttttaaaaaaggtctgagttgttccccacagcggtgactcatggtttggaaagaactactgagttaatgaaaaacttgaggtaacggacgggtgttcttttctctttataaaaatgaagcatcagtttgaaggaatgagttttcacctagtttattcttttattctttgtcacccccttaggtaatgaatagggaagcatttatatcttgcacttaaaatttaataccttctttaatttggggccaccttacgtgcttctgggattccttccgtcttgtaccctagagaatatcatctagtggactctggttacattatgagaggcttaattaagtttacttcttttactgtttcatgagtattaaaggcatggaataggaaaacacacatctttcagcataaaatctgtctccttgaatgaaggacaggaaataaaaagaataccaaaatttatacttcaagggaaaaatgcaatctgtaggagttcctcagttataaggactgacactgacattgatcctatctcattaatttgcccagagggaattgaaatgtctcactgttataaaacattaaaagaatggtgggggtgtgaacctgggaggcggagcttgcaatgagccaagatcgagccactgcactccagtctgggcaacagagcaggactccgtctcaaaaaaaaaaaaaaggttggtggattttttttcttgtaacatcattagtaactctgacaagagaagaaactgagtactatatattgtagcaaattttaagcaaataggtaaaaattattatcaattttagcatgtttatttcattttttctttttttttttttttgaaacacagccttgctttaatgcccaggctggagtgcagtggcatgatctcagctcattgcaacctccacctcccaggctcaagggatcctcccacctcagcctctcgagtagctgggactacaggtgtgtgccaccatgcccggctaatttttgtattgtttttgtttttgtagagacagggtctcactattgcccaggctagtctcgaacttctaggctcaagccatccacctgccttggcctcccaaagccctggaattacaggtgtaagccgccatgcctggcatcatccttatttctttttctttttctttttaggcagagtttcgctcttgttgcctagactggagtgcaatggcacgatcttggcttactgcaaccgccgcctcctaggttcaagcaattctcctgcctcagcctcctgagtagctgggattacaggtgtgcaccaccatgcccagcaaatttttgtatttttagtagagaaggggtttcaccatgttggccaggctggtctcaaactcctgacctcaggtgatccacccccctcggcctcccaaagtgctgggattacagacgtggccaccgcacccggctatcatgcttgtttcttaagacaaatatcattgccaaaaatggtggctacaaatggcctttaccctgaaagagaccaaacagttccattactgatactagaaatgtgcttggcaaagctatttttaatagaaaatacaaagttccatgtcagcttggcatgcccaaattatcacacattccaaatgggcagtcagaatgaatgagtttcctctaaattcccacgttcagaaagaaaagggtaaacatctgggaaggaaagttttaagaaccaacttcttgcttccatcagcgtattaaaaagtgcaataaatctaaagatcccagcttcaagacgtcagtgcccaggtcttagttgttgtttagaaggatgtagggaaggattaagtaagaaataaaggagcttaaaaagcactaataaactgctctaacatggactgttcaatagtcaagaaaactcactgaggacactgttctgagcttcccaagaagggagtctggaaaatcacagctatttccttttattctccctcgaaattagaattgttgcataataaacactagagctgaccgcaaagtaaacaaagcaaaacttcaacttttttggaatccttttgcttgaggtttactaacattaaaatgttaccgtattgaactgaaagccttcataactaactgtaatacagcaccttactccacgtagaggatgcctcctgaccaaatagtgttgtggtattttctgcactttaaagtcgttgtgccgggggaatgttctcttccgaaatccctcagcaggtcagaagggctcacacaacacagagagctgtgggtacttgagggcagtctgggtgctccagaaaagttttgtgaaaatctatgtccagcaaattcagtcaatattcatttaatatcggcaatggctccttctgtaatgtgcaccatcaggccccacaccagctaataggtgtttccaagtttaccttcatgtctccaggcagtttttctactgaaaatggccaacttaagaagcacccctggaagccaggcacttcctgcctgcaggccggaggcagctcactccaaacctgcctgaatgcctgtctccaggagggacgggtgtagacttctctcaatccacttagcaccaaacctttgctcctccatatctaagctgtgctcctatccagtgccaccagggaaagagtttctggcccctcactagaacccacatggaagctcctggcatctccacctctggaggtggctcagagacaggtgtgggagtggcaacttctccattatgaccctgacaagcgtagcagggtttctagctgatccagggcacgcgttcccagagtaaatctgtgagaaggaaggtcatggccagctctgctgacttcaggccctactggctccaggccctgtcccctttccctaagcagctgcagcgcctgacccctcgtcacctgtgtcccctccctgggctctaggaccaattctgaactgagatcgaagctctaggtctaacccccagctcccttctgctaaaagtctgacctagactatgtattccaaccagataagaaggattttacccatttttccggtgttctattgcttgtatccaaatgttggtgaccttatcttttgctcctggagcctgagtggctgccttagcaatgcagagctgcgtccttttctttgttctctccaatgcccctcctctctccaacctctcctctgttcccctcaagcccaccctgcaagggctggaatcctcctgtctgtgactttcacccagtgtctggggtcctgctacctaacagctccttttgaggttgactgcccacctaggtttctcaataaggtctatccctagatgtccctatgagggcagttcccctatcgattgggaaaacctcctaattcaggtgggagtttctgacaccaagggcttacctcctgcccctccttctgaggcctgggcttttctgtctgctacgctggagtctcaaggcctggtgggtctcaccccattcaagttaactgacagcataacagttcaacctcaggtttgcccatgcagccctacttaacccagttaatgtaaaacaaaacaaactaaaactgagctatacttggagcactattcaatcaaaatattatttataacaataattcttggcaaaaacatattagaaccaccaaacaacaaataaatcctttcagatccatcctgttctctctattctgattgccactaattcattcatctcttgggtggatgctgcagcagactcttagctacatctctgtttcttctctgagccatctcatttctaatgtgtccctctggctgatcttgctaacatgcaagctgacccgtgtcactgtctggcttaaaaattcctcagtggctccctatgaccttcaggctctaacaatgctgtagttgggttcctactcatcacccctcccctgccctgctcacctgacgccctctaaccatggtaggccacttgcccttcgatgaacgagtaatatgctgaaggcattctgtctttgcaccaactctgctcccttgtttggcatggggatcaggcccatccatcctggaggctcagtttccatgccagtcctgttctccaggagctctcaccctgctgctccctgggcaaatctgggttaggttgcccgcccttgctccggacccccacagcattccagcttcctccagcaaagcccctaggctgtatttttcttctctctttacatgcctttctctgtgtctttatagccccagagcccagaccaatgcttgacagatggctgtccccacaggttcctcactgaagctccctccctctccagcagaaagccccctcctcaggtgggctctcaggtaccacctgccatgtgatgccatacatctcagaccctgaaactcagcaaaagacctgctcagaacctgagaatggacagttttggactttcttaaagctaaatctgatatgtctaatctgacatgtctgatttagatacgtctaaagaaagtagacatatctaataatctactttctttagacgtatctaaatcagattattttcatagaaagtcttaattcatcagccaaaatataataatgtaatttgaaccaggaaattacccatagaaaagtgactaaaatctaatgtgctgacacaaacaaaattaatcacttccatctgtatatatccgttctcagttgacccagcaaataaagcgtttacacttgcctgggatatccactagaacttaccctaagtaatatacaatgtatagaaagtgcattttagaataatgagatatatgagagacagaagataagcttggacacaaactggtatcagaggccagactgttctggaattacccctctgctgaggattactacctttcacagggtagagggtgtggcagcactgttcctctgcctagaggtttaagagtctgctttgtcattagaactaattaatttctgttaataatgtggaaaagtctatgttccaatcaccggcatgtggaatatgggatggggcaaacttgcttctttggaatgaatatcattctatcacctttatgaaactaatcctttgtgggtacttcattctatatttctaatttgtattccaaatgtagatctatagctacttctttcctactctgagacactagatgaggcatgagcaaatggggaaaatgtaaatgaggcctcatttgatgattcatgtcttaggaactctgtcctcattcaaagcgttttctcttccaaactgtattctcccaatatcctaataagtcctttaagtggcatcacaaagcatccttttctgagcagcaagacacaaaaaataatagctatcccattaaactgttgggtaagaactctggctgcaagaatcattcttgttctgtaacaaaaccctttctccttctctaaggataaatttgaccttgggttaactttctatctcagttcccctagaaaacaatgaaggtagaatgttagctgaattactaggccacaaagcatatggttaaaatgatccctgatttggtaaattgcatagatatctagtagaaagtcattgctctaggcttttctgagtgcgatgattcttgtaacttaatatgacccttgcttggaccttagaaggcatactatggagcagttctaaaagatactggattctgtggggcatctaagccaagaaagactcatatccaccaatgtggatcttgtccttttgcacctgagctttcacttgaggagccagagactagtctctggaactcttgcaaatactccactgaagagaaatgcttgacactgactgtccagcaagccgtgtttcctgccctgtatccttctaagtgaatctgagctaagtgtggcctatggtagtgaacttgtaagactgcatgcttaggtgaaaacccctagtggatgtggcataactaccaccccctgtataacgtatggctattgtgttttctgcaatgcgttttcttaaagacgtgggatagaatgtcaaggaaacagtaaattgattctccctttaaaataggtaaaattgataaaatactaagagaaaacaccctatatttaggcaactacactaggactgcaaccatgcaaaaaggatgagtaaacttgcttaaggtttgggaggaaatatagaaatattcatattgctgttttgttaaatgagatatgggattcagggtgatgttctttttagaaagtatttattatggcattataatatggtctgtgtaatatattaacattttaaaaaataagtggaaggccctttgactgcatcatacccagcttaatccagtgctccttctccctaagctgtcctaccatcttaaatatcctcttcattcagccatcaaaaataatgaagagacccggtacagtggctcacgcttgtaatcccagcactgtgggagactgaggcaggtgggtcacttgaggtcaggagttcgagaccagcctggccaacgtgacatggcaaaaccctgtctctactaaaaatacaaaattagccgggtatggtggtacaggcctgtaatcccagctactcggaaggctgaggcaggagaattgcttgaacctgggaggcagaggttgcagtgagccaagatcgtgctgctgctctccagtatgagtgaccaagcgagactccatctcagaaaagtggtagagattaaaatgcaaaacaaaaaagttgtattgggaggttggtagtggagtgagagggatatcttagtgctggctatgatgcttttctagcactaagatttctccttgcaggataagtcttgctgagataatgtcattaggtaaaaggcagaggctgtgtgcagcctgtagtacttaatatggagaccagtatatttggttttaaaaatggtacctccaaatataatacttaaagaaaagggaagctgataccccatttctatgacatatgcctagaattttggtgcttttgtttcccgcaagaatgaaatgttctattattttttcattttcagaatatattcctctcattagaaccccatattatatgcataacccaaaaagtggaaaccatgttcttccaccagtggcattagaccaagaaagcctgcctttgaacctttaaaagcctgtctccaatccttaaaaccttaatggctagtgaacacagcaattcccaattaagagtcctcaaatctgatctcaaaaataactgtcatgttttagtagaagagtgtatctgagacttggccctagaaacatgtttaaatgtcaacaataacagcagatacctggaaacttgttcacttgaccggagaatatgtcattgtcgtgaaatgaaactccatgccagtagatgtcacaaggcaagcgccggccaaatgggaactagaagagaaaaaatgtgactcgcaataagaataagaagagcagtgaccacactgagtatccattatgtacaaattcctggcaccctggtgtacttaccatggtttaatccttataatacgcatatgaggtaagtgatattctttgccattttacagatgaggaaacagattcaaacaggtttaataacttgttccaagtggtagagctctgattacatgtggcagatactacactcctggctttgcaggcaccatttcactttaatccttataactaccctataaaggattactcccattttgctgattcaaaacttggggctgacagaggtaatttaacatgcccaagggtcacacagagctggtaaggggaggaaccaggattagagtccaggtctatccaaattccaagcccatacatcccttcctctgaaaattacaaccctcaaccgagcccaaaagaataagctttcagagtccctcttcccttatctctctctctctctctctctctctcacacacacacacacacatacacacacacatatgctccatgagggtaagatgaatcccagggcctaaaacagttccccaaactcgtaaagacttcctgaattaataaatgaacaaatcaggagtggtcatctgactcaagatgagataaccagattctctcttccaggaatctggaaatcagagatgccaggcagcctctgctggcccttgaactggcagggataaaaagccagggcagggcagctgtgcttggctatgtgcacaggagcagagacagccagtctgctgagagacaagaaaggagcaggtgtgggagggaaagcagagatgagacaacatagccctagaaactcagactgagtggcctcagacccgcgtgagcctgtaagatagccttgtatcctgagaatacctttttggtcttctaaaatcttgtttggcacaagctatagagtttcaattatttgaagccagaaaatttctcaccgagacaaaagggcctgttctttccactacatcctgttgcttctcaaagttatcaacaagctctgcatttaatgaacatattttttaaatctgtaactcagatgaccttgttaaaggagaaaagagaggccatgttagttcatattcagaatttgcttgttaaaagtgcacacaaatagatatgccaacatattaaataaaaatcttttgattttcccattctaggactataggtaatcagaatttttatctacttcaagttgaggggccaaggtccaatggaagaacatagccttactaatgaaatggtggtgactcaatgctttccatacattccacattaaaatgaagccagcctcaagtcatttaaatcagtcacattatttcaaagctgtgcacaatgaggcatatgttgtacactctactcacattaacaacttccatctataatttacagcattttgctcattttctttttatgcaatgggctgtaagttattaattcagtactcataaatacaatgagatacaacatatgttattttcttctagctgttaagtgctaatatagagaaggagaaaataaccagaattaagcaggctatccgagcaaagggtaaagtggctttgctttgttgcccacaatgaggaaccaacaccttgtcagtgggcaacccaatgactcttatctcctttttcatcactcttcaatgcttaccaccctcatgaataccaaattgcccccccttttagaggcacctttagctcattcagttttgagaaactaccatttttaaaaacatgtccattcactcagtaattattatatgccagactaggtgctaggaatatgggggatataattttaattaagtcccaggatttcataatcctacctctttttaagctcctttaaaaactgtccgcttacacagctaacatcatactcaatggtaaaatactaaaagctttaaagcttttccaccatgatcaggaataagacaaagatgcccacttttattttacatcaacatagtattataaattctagccagaataggcaagagaaagatatagaaggtgtccacattagaaaataagaagcaaaattatctgtttgttgatgacatgatcccatatgtagaaaactctaatgattccacagaaaaatattcaaagtaataaacaaattcagcaaagttgcaggatacaaaatcaacacataaaaatcaactgtgtttcatacatgatgaggagcaatccaaaaaggacctttttttaaaagaattccatttataatagcatcaaaaagaataaaatacttaggaattaaccaaaaaggtgaaagacttgtacactgaaaactataaaatatttgtaaaagaaattaaagaagatattaatacaaataaacagaaagatatcctatgctcatagaccggaagagttaatattgttaggatgtcaatactacctaaaatggtctacagatgcaatgcagtctctatcaaaatcccaataactttttttcaaaataaaaaaatccatcctaaaattcatatggaattacaagggaccccaaatagcaaaaacaatcttgaaaaaaaaaaaaagaaccaagtggagttctcatacttcctttttttttttttttgaaacagagtcttcttccatcacccaggctggagtgcagtggtacaatctcagctcactgcaacctctgcctcctggatcaagtgattctttctcttctgcctcagccccccgagtggctgggattactggcacatgccagcgcacccagctaattcttgtatttttagtagaggctgggttttgccatgttggccagtctggtctcaggccatccacctgcctcggcctccccaagtgctgggattaaaggcgtgagtcactgcgcccaggctggaggtctcacatttcctgatgccaaaaacaaagctacagtaatcaaatagtgtatacaatcacaatgagataccaccagcacctattacaatggccaaagtccaaaacactgacataccaaatgctggcaaggacgtcgagcaacaggaaccctcattcctttctggtggaaatgcaaaatggtaaagccactttacaaggcagtttggcagtttcttacaaaactaaacatactcttattatataatccagcaattagttctcctcggtatttatccaaatgggttgaaaaacttatatccacacaaaaatctgcacatgaatgtttatagcagctgtattcataactgccaaaacttggaagcagctgagatgtccttcagtaggtgagtccttctgtaggtgagtagataaataaactacagtatatccaaacaatgaaatattattcagtgctaaaaagaaatgagctgtcaagccacaaaagacatggaggaatcttaaatgcatattactaaatggaataagtcaatctgaaaaagctacatactgtatgattccaactaaactacattctggaaaaggcaaaactacagagacagtaaaaagatcagtatttgccaggggcccgaggggaggaagagatgaataggtgaagtacagaggattttagagcagtgaaaatactctgtgtgatactataatggtagatacatgtcattatacatttttcaaaacccatagaatagcaccaagagtgaagagtaatgtaaactatggactttgggtgatgatgacatgtcagtgtagtttcatcagttgtaaaaaacacaccactctgattcaggattttgatggtgggggaggctatcaatgcaggtgggggaaaatctctgcaccatatgctcaattttgctgtgaaccaaaaatgctttaaaaatgaaaataaaaacaaatgaaaaaaatcagtgtggtactggcataaagacagatatagaggacagtgggataggatagctcagaaataaagcctctcaggtgtgatcaaatgattctcaacaaggatgacaagactattcaatagggaaagggcagtcttttcaacaagtggtgctgggaaaactgaatatccacgtgcaaaaagaatgaagttggacctttaccttataccatatacaaaaattaacccaaaatagatcaaaggcctaatcatatgagccaaatcaaaggcctaatcatatgagaaaagcttcataacactagaaatacagaaaatataggagaaaagcttcataacactagaaatatagaaaacataggagaaaagcttcataacactgcatttggcaatgatttcttggatatgacaacgtaagcacagccaacaaaaaacaaaataggtaaatcaaagataaaaattaaaaactttttttcatcaaaagacactatgaacagagtgaaaaggtaacccacagaatggcagaaaatatgtgcaaaatcatatatttgataatagatcaatagtcagaatatatatatatttttttcttttctttttttattttattattatactttaagttttagggtacatgtgcacaacgtgcaggtttgttacatatgtatacatgtgccatgttggtgtgctgcacccattaactcgtcatttagtattaggtatatctcctaatgctatcccttccccctcccctcatcccacaacagtccccggtgtgtgatgttccccttcctgtgtccatgtgttctcattgttcaattcccacctacgagtgagaacgtgcagtgtttggttttttgtccttgcgatagtttgctgagaatgatggtttccagcttcatccatgtccctataaaggacatgaactcatccttttttatggctgcatagtattccatggtgtatatgtgccacattttcttaatccagtctatcattgttggacatttgggttggttccaagtctttgctattgtgaatagtgccgcaataaacatacgtgtgcatgtgtctttatagcagcatgatttataatcctttgggtatatacccagtaatgggatggctgggtcaaatggtatttctagttctagatccctgaggaattgccacaccgacttccacaatggttgaactagtttacagtcccaccaacagtataaaagtgttcctatttctccacatcctctctagcaccggttgtttcctgactttttaatgatcgccattctaactggtgtgagatggtatcgcattgtggttttgatttgcatttctctgatggccagtgatgatgagcagaatatatttttaaactcctacaactcaacaatgaaaaaacacttacaaaatggacaaaagtcctgaatagacatttctcctaagatatactaatggccaatgagcatatgaaaagatatttaacatcattaatcatttaaaaaattgcaaatcaaaatcataagaaactgcttcatacccattaggataactattatcaaaaacaggctgggcgaggtggcacacacctgtaatcacagcactttgggaggctgacgcgggaggagttcaagaccagcctgagcaacatagcagggcccccatctaacaaacaacaacaacaaaatacctgaaaaattagctgggcatcgtggcatgcctgtagtcccaactactcgggaagctgaagcaggaggattgcttgaacccaggtgtttgaggctatagtgaactatgattgcaccactgctctccagcctagatgatagagaccctatctaaaaaaaaagaaaaaaaatcacaggacctaagtgttgacaagtatatagagaaattggaacccttgcacattaagaatatagaaagctgctgtagttaaaaaaaaaaatcactggctgattgatctagcaattccagttctgggtgtatcccccaaaagaattgaaagcaggctgggcgcagttcctcacccctgtaatcccagcactttgggaggccgaggtgggcagatcacctgaggtcaggggttcaagatcagcctggccaacatggcgaaactctgtctctactacaaatacaaaaattagccgggcgtcgtggcgcgcctgtaattccagttacttgggaggctgaggcaggagaatcgcttgaacccaggaagcagaggttgcagtgagccaagatcacgccactgcactccagcctgggcgatagagtgagactccatcgcaaaaaaaagaaaagaaatgaaagcagaaactcaaacagatatttatataccaacattcataggagcatattcacaatagccaaaatgtagaaaaagcccaggtgtgtccattagtggatgaagaaataaacacaatatggtatataaatacaatagaaaattatccggccttataaaggaaggaaattcttctacaacatggatgtaccttgaagatgtgatgctaagtgaatgagtcagacacaaaaagacaaatatcgtatgattctacttatctgaggaacctagagtagtcaaattcatagaggcagaaagtaggatggtggttgccagaggctgaagggaacagaaatagggagttagtgtttaatgggtacagagtgtcagtttgggaagataagaaagttctggagatgcatgacagtgatggttggacagcagtgtgattgtacttaaagccactgaactgtacacctaaaaatggttaaaatggtaaattttatatcatgtatgttttaccacaataaaaacaaaacaccatctacttaagccccctgatagagtttggatttgtgtccccgcccaagtttcatgtcgacttgcaatccccagtgttggagaagaggcctggtgagaggtgattggatcatggggacagacttccctcttgctgctctcgtgacagtgaattctcacgagatctggttgtttaaaagtgtgtagcacctcccctccttctctctcttcctcctgctccagccatgtaagacacctccttcctgtttgccttcttccatgattgtaagtttcctgaggcctccagagccattcttcctgtacagcctgtgaaccatgagccaattaaacctctttcccttatcaattacccagtctcaggtagttctttatagcaagaacagactaatacgccccctgcagctgaggggccatttgtggctctactctgagctgtctgcagtgtagaatgctgttcagattgtcatggagcattgaaagctgacaaatggttctcagatccccattctccatctttttccagtcctgaccatcctcccagtttcccgagttctaaatctggtagtcatctttccttttctcttcttcagacacttttggaaaaagcactggatttgggatcagcagacctgagagtcctagacttgtctctggcactcactgtgagattgtaattaagcctctatcctcaggagatagagatgaggaaacgtggcaagatagcgaggagaaccaaccaagatatggaaatggaagggcttagtacatgccacagaacaacacaatctgagttccatcattgattcaggtactcattaggtgttgattaagtacctcctacgcgccaaagggtctcaggagccaacaacacaatgggaaatgtctgccttcggagtatatggtccatgggggagaagatgataagccagatggtgctcaaaggtatcactataaaccatggtaggggctgtggaaggaatcccagagagcaacgagggcacaggaagacctagtcacatctggggagcctgagaaggccaccccgtgtcaggtgaccacctgcccatttgtccagaagtttccagcatatgcctgttgtcctggtgtcattgttcataacacccattgcactttcaaatgtatcccagtttgggcaataaataaaatggtcaaccttttcccgaggatgggcaatttgagctgagattggaaggaagaatgggagttgactaggagatgagggaagaagggtgttcagacagaaaataaatgtgtaaaagcacagaggtaggactgtcattggctcaaggcaaagcctgatggagggtcagggtggctgcagcagagaggacaagagggaagtggtggagatgagacttcagcagggggcagctcaggtagggctgcaccctgtgctggagcatgcccccaccccctctccccagaagagaatgaacccagcgacccagctgggaaatagagaccacagagagagagagtacatgttgtaaaagcaagggaaaagtgtttcaagactaaaggagtggtgggaagctgagaggtcagacaagatgaacattaaaaactgctcatttgatataataccacagagagctttggaaccactccagttcacaccatcaccttcctgattcccttactatgcttaggatgtgcctgtgctgttctttagttatttcatgtgtaatccttatctccttcattaacactatgcatttctagggctagggacaatttgatatgcgtgtctcaggtctccagtggggtgtaaccaggtatctggcaggtcccaggcccacaggaaaattagaagccataatcctgagaatcacccatgtcaccttctccctcctcaacatccactgggcagcaagccctctggctgatctcttagcttatttttaatttcctctccttcctgaatccccactgcctctgccttacttcagggcctcatctctcaccagcctcctcccccatctcccttcctccagggtctcctctttagtctacctgacacacagcaggacgagagacttttattttcattatttttatttttatttttattttttcagagatggggtctcactctgtcagccagcctgggtgcagtggtgtgataatagctcactgcagcttcaaactcctagcctcaagtgatcctcccgcatcagcctccctagtagctggaactataagcaaatggcacagcacctgactatatcttttactttttgtagagtcagagttgcgctatgttgcccaggctggtctcaaactcctggcctcaaacggttttaccatcttggctttccaaagtgctgggattatagatgtgaggcactgaacccagcccagatttttatttttaaacacagctctgaccatattgctcctttgctacaactcttcaatgcctccccgtggaccgaccacaggatcaaggctaagctccaagcctcatctgaaagacacttcacagactcccctctgccaacctgcccacctcaagttgggccacttaactcttgggcacttgcactgtcactgtgactaatttcgatcctttaaggatacagcactttattatttagtggcctgggtttcttcatgtcattccttccgcctgggatcttctgactgggcttgcccatccactccccctccatgatgatgatctctcagctctctttgtctgtggcctctgtcgctacacccatcacaggccattctgcaacatcttgtctgtacatctgtccacctggccactttgcaaactccttaagcacaaggagagcccatgatcatcagtgtatccctaacaccaaggcttcagcaccctgtaggctttgtttttaacctttctgaggtcataaattcctttgagattcgtgccagaaaaaaaaaaaaagcacgcacatgcacaaaatcttccacatgagcttaggagattcaaagactccctacagcccctagttgttctcagataccagtgttagcaatgcctgcagtaatgtttcatgaatgaatgaactcacaaagagcagccactcaaatacatgtcatcatcatcaccactaacattagcatttaggtaatgcttattcctatgtctatgtgttaaacactttacatgtattaccttatttaatccacaaacatgataaaagtgctattaacccgatgataaagattatgatataggtgctactattaaccctatttgcaaatgagggtaccaagtgctaggagagtaaataactttcccaaggtcacagaggtattatagtaagggcagaggcaggatcaaatccaggtctgcgcagtttcaaggcccatgcacttaagcactacagatgtctttttggagactgctatagtcttatttactagtcacgcatgaataactgtaaccctcaccctacatgctaccatctttgtcacaaagaaagttcctcccccagagtatacacctggatggacccgaaatcttttccctcttgaccagaagaactaaaaacaaacttgcaaaatagtcatgttcaaatgagaactgaagctgttaaatgttctttgagcaaatctgtgtttaaggaattgatgttcgggtccctcttctaatggcccaaagagaaatttcaagtccccctggggactttgcaaaatgaaatttcacagtgaatgctgatgaaagcacagttcacatttctgtactttgtgaatgattttcttcataaagcttctctatgaacagaaagcatttcaactgactgaggataaaggtggcaaataagctttgatataagcaagtctgtgtgcaatgcatctgtaggggggaaatggtccaaatggctgctctaagatgaggggtccaaagtactcaaaggaaacacagggaaggtgctgtcatggctaaggtaccaagcgtggaccagcgagaccccagctcaagccgcaacccaccacaccccactcagagactccagcagtgactttgcttccgcagctcagctacaactgagaaaaacaatagtaataaaacctgtccacctcccagggctgttatgtggactgcgataacacatgggaaagcactttgcaaacagtacattgctgtaatatgagacaagttattatttttaatgtccaaggaaatcacctcaacaagtaacttcaatttaaaaagacaccaaccaaatatcgcgtgtcattaggacagctcttgagtaaggacactgcggtgtgcgtgcacttgggaaaccttccatgatgccttcaggcaggttaatagagttctctccaatgttcccctggcattctgttggtgccagtaatatagccactgtcttacggggcattaatgtttacatgacggcctccctcacctgacagatgcttcaggggagagaaattttattcttctttctatcctctcccctacctgtggtctgcagcctccaagatggtccccagtgatccctgcctcctggaattcaatcccttgtgtgtcctctcccacattgtcacaggcttggtctagatgaccaatggcatacagcagaagtgataagccgtcacttctgatatttaggatatttttataaaaagactacggtgtctgccttagtctcctcactccccctttgctttgggaatgcctagggagacgcccacatggtaagcaatcggagtcacctgccatcagccatgtgagtgagcttggaagtggatctgtcagccccagtcaagtactcagggtctgcggctctgcccaacagcttgattgtagcctcatgaaaaagcctaagccagaaccacccagctaagtcacactcagattcctaaccctcaaaaatggtgtaagatcatagatgtttttgttttaagctgcttagttttggggaaatttgttacacagcaatagataatgaatgcaccatttcagttttagagcaaggtcccagagaaagaacatgttctgagaatgaaggaatttaagattaatatatccttataatataatgaatataataattactattgagtacttaacaatgtgccaggtatcttacataaatgcctccattttgcagataaagaaatataatcccattgctaataagtgacaaacccagaatttgaagccatgttggtttatctccaaagactgcattccttcaattcgactaagggggatggatggatggatggatgaaatgagcacatacagcagagagttgtgacaaacacttcaaagaagatatcataaatttctttaacataccctgcagtttctgccttggcatccattttgtggtctagcataaagttatttgaaacccagtcataccacatcgcctttggcctagttaaaactttccctcccatgtggttgcttgtgatactgcctgcttgttgctcatcccacggacccaaaacccaacacacccacagctgctgaccacaacaaaacctaatcaccaacaccagagtctgtctgtctctcttctctctctctttctctctctctgtgtctctctcttgctcactcactcgctctcacttcccactcgctggttgagctctctgtcccctccagacttccagacagtccccagtcaatgcccctaacctctctggatcctctgagtaataaatttcttctgtttcacctcctcattgtgtcttatctgacacacacccaaacctaactttccccttggtcagggctctcctggagactggctatcttggcctgtggctacgctcaacagagagacctcgagaccaaattagaaagaacccaaaacaataaaaatcataaaagaaaaaacatagcacagaaaagtccagaagaggccaattaagacaaagaaaggactaagcaactgcccttcaagagtggacaaaaaaaaactatcactcttcctcaatcaagaaaaaaagcagactaagaaaatactggtggaaattgatgaaatcctgaagggtgtgaccagatggaacacagttctatctgccaaatgtgagcacatcaaaagaaggcatgtccctttcaggcctgaaagagggaggcccgctcacttctctgccttgctgctcacatctcagtgaacagcactgctccccagacagaggagaaattccaccccaactgaggggctcaggaagattccaggctcactcttgcctatggaaaatggagctggtgagaaaaggtttccccatgccagcaagggaccagacagcttcccgactgcagtgtctttggatggggctggtggggaagcccacctgtgggagcaactccaagtctgtttcctcgatgggaacaataatgtcgacttgattgggttattacaaggattaatagtatgtttggaccacctagcacggggcctggcacacaatgcttgatgcatagcaggtgttcaaaaaatgctggtttcttcttctcttccattctttcctatcattcttcacctcatacttattgactgataagatttttaaaaactcttccttcatccatctttctgttacccaaaagagctaggagatgggggtgttttgcaggactagcctaagtttaaatgtgcacatggtacaatcagggtattaaagccatgtgagtcttcatgggtaggcacgtaacctctggagaaagcccacaagtgcagaaaggctccttccctcgagttcaggaacttggattcaaatctcagccctgccaactattaagggcctgggtttcatcatctgagaaagatgagtagcagagcctccctcacaggggatgttgtaaaggtgaaaacaaccgcataggtgaaagtctgtttgtgaatggcctggcagacagtaggagtcaaattagtccaattagagaatattgaaagcaagcctcctggattattcacctaattaagtcccttggtgagaaaggcagagaggaagagtccccagacatgcctgctggcagagaaagcagaagctggccgtccacaaacccacctcaggaaaaagtccatcaagcatggctctggtccaccaggaatccaggagccgggtcggggtagaggcagatgtgtgggcagatctgcaaatgcactctgcgtgtcaaagtgctgtgtgagagcccagagggaggagcagtggtttctggtctagatgagaaaagcttaaccaaggaggggccactggagcggggcgtgaagtaggccttcgcaaaggaagagacgaagggaaatcaggcagaggactataggacagcagagatgtcccacgtgcctggagcctgggggaaaggggaacagccaaagttggagaggtccacgcagcccacacagcccacacagatcacggtaggctcacagggcaagctgcggagctggagcttgactctgcaggtggaggaagtgcccaagcagggctgtgtcagaccagggcagaatggagagtggatgaggagtagagagagactgagagcagccaggaccataaggaagctgacctaggctgggagaaaggggagggagcatgggtggggactgggcccagaaaaaagtatgcgcagggagcagggctgggggaaggcgtgggagagtaaaggcagtcatggctccgcgtgcaaggactgctctgacagttcacacacttcacagtgcccttccctcctgcccgtgggctacattcctgtctcacctccgccaggttcctagtcgtttgggaatctgaagggagaggctcccacggagataactagcgctctgaagagccttccaatgtaataaaggcgccgtctggctccagtgggtttcccgggaacacaataattactcatcctctaatagagccaataaatatagcaagaggataagtaattaacaaccttttgctggaaagtagcaattcttgtgatctatgaagtttccttttcctgttcacttcttcttcattattgcaaatatgataccccgggtaagcgtgccattcatccttcactgagttaatcaccaaagcatgttgtattttttattaaatccattcattataattgactcatatgaatggaagctggaagagcggtggtgaggcccatcgtccgccttgcttccgcttgtgattgcaatacttttaatgagatcaaaattgttaccaaacaatttaacaatggggaggaaaaaaacccattagtaggaggggaagataaccttgcccctttcataatttcagcgtaccatagcaatctcctccagttatttattctgctatctaatttcccacccataaagaatctttattagtagtaattatattattaggcaacagaaaaagaaaaacttcacaaacttctaaagcgatttacctcttggcttgcagttttaattaaaattccagtttatttagcaaatagctctgaaaagattagatacgaatttagcactatgttctttttccactttccaattcatgagggtgatacaaacaacaaaataatctctttaaatgactcttactccattccaacataattcagcccatggaaaagagttccaatatcaattataaattataaatgaactccattataccctgcaaattatcaacagtaatctcccagttctctacttcctcacagttggtaaattatatcaattcaccactaggcctcaaattacctagactcttccatatcgaaactttaaatggtttattaactgaaatggaaacaatgcaaatcaggtttccatttcagcaacacttacctcccacccaggatatcagacaactttatccaaagtcacacctgacttctcttagggcagcttttccccagttatccaggaacccagtccaattcagtactttccccaataaaaagtcccaccagagcgttggtctaaaggcaccatggtgttgccggtccataaattcatttattcaacacataagcaagtcatgcctctgagccaggcagtatgcttggggaatgctcagaaattccacacacaggagcagagggttagtggtgacaggcaaagctgaaggggggatgtgtcagtctgggttctctagaaagacaggactaataggatagatagatagatagatagatagatagatagatagataaaggggagtttattaagtattaactcacatgatcacaaggtcccacaatagtctatctgcaagctgaggagcaaggaagccagaccgaatcccaaagctgaagaacttggaatccgatgttcaaaggcaggaagcatccagcatgggagaaagatgtgggctgggaagctaagccattccaggattttcacatctttctgcctgctttatattctagatgccctggcagctgattagatggtgcccgctcagattaagggtgggtctgcccttcccagcccactgactcaaatgttaatctcctttggcaacacactcacagacacacccagaatcaatactttgcatccttcagtccaatcaagttgacactcagtattaaccatcacaagggaacataggaggatgaatgaaccagtggacaagtcagataaataaggcctgcagtcaccatctaagccaagctttttacctatgctgtcaaatttccagtcaaagctccacaccaccttgtaaatagccatcatatcctcatttcacagaaggagcaaccaaggctcggaaaggttgaagccatttgaactgactcttgacgaaaaaaagggaagttaccaaaagactgggagggagggtgttccctcaggaggaagcaaactgcatgggcaaagactgagcagcgagaagccaggagcccaagttgctggtcctgtgtgtggccactaacttgcggagctgcctcgggcattcacagacctcttcaagcctatttccccatttgccatatgcaggatatcccccattctgcaaatctgcaaggggctgctcttcttttccagcaatcgacaatgacttgtcctgagcctgatgtatgcactgctgccaaaataacgtacccaagggagagagaagaggtctcctagaggactaactaaaggtgactcggctttgccccctccaaattcatttgctcctcctgatcccaaaacccagcctgaaattcccagagatgtgccactgccacaagagactcgagtcatacaatcacatattaacaaaaattaatattgtaccaataatttctgtaataataatgaaaatggctactatttatgtgctgtgtatattacacgtgctatctcaattcactctcacaacaacactatgaaataggtagatatattattttcactttacctaagtgaaaaacctaaactcagagcaattaaataactggtttatttaaccctctggtactgcatctagtaagtggcagaacaaggactagaacccagcctcattaaatccttaggccccatggaactgagcctaggagaaatggatgagattcctttaactgtcatagaactgcggtgatgatggggtgtgtactgagttcctaggcccattcttgggagaagagtcaggggagggacctggccccacctaggagctctccagagtgctgaacagactgccacagcattcccactcaaagcactgcatcttccacctgggtgtccatgtctatgtcaagcctcacctcctgatatcagtgaccaacagaaccgctaatgcaatagtgttgggaatgggagtataaacgggagaaaaaattaacttttagaagaactgagctagaggggataacaggacatcattcagaggtatcccacaggaactggaaattcaggaatgggagtagagagaagccaaggcaagaagggcatgtgtctgcttcacagaggaatcatagaggaaagaagtgctgaatgggtggatgtgttcttggagtgattgctgagaaacagcaaagccagaggtgggaagggaaggagactcctttcagctgccctagacagtgggcgccaagaacaaatattgcattaaaccccattattgttttaaaggtgttcagggaggatggcattttactgcctgtagatttaaatcggtgaataaattcccactaccactcctaaacctccagtaagaaagaacaagaaatgacaaagtgttccagggaaaaatagaaaatagaaagtgatctgctgtaaggtgacatgattcaagctcaaatcctttttttttttttttttttttactgaatctcactctgtcacccatgctggagtgcactggaacaattcagctcactgcaacctccggctcccgggttcaagcaattctcctgcctcagccttcggagtcagtaactgggattacaggcacccaccactacacctggctaattttcgttatttttggtagagacggggtttcgccatgttggccggggtggtctcgaactcctggcctcaagtgatccgcctgcctcaacctcccaaatcgctgggattacaggtgtgagccactaccccgccaatcatatccacttttaattgaagtaaaaacatcttaaaattttgagaagtcacttggaaaggccctgagcttctctttggccttgagaccacagaaccaaaaggcttacataaagggatatttataaacacacctctccctctggtggtaaaagaggtatttaaaaagcacatttattctctggctccatccccacctccaccctcctacagaccttacataaaaatagttatgcccttttatgaacttagtctctcattcaagcccactttattatgcatcaactcagtgtcaggcactgaggggttcagaaaagaataaggctcagtccctgtcttcaggatggacttgtaaacaaatgataatgcaaattcacccacgttctagcaggtgagggccaaagggctacaggagcatgaagcagagcatgagttattctgctggaaggaaaggtgtggtttggaagaaatgtcaaaggtgaggtagaatttgccaagtctagaagccaggaaagtggtgtgggcacgggaccatgaggagcatgatcataggtttcctcgaggcaggaacaccttcatgatttccatactgctggtgcctagcccagtgcctgggagggagtaggcgtgaaacagatgctagaggaattaatggcatgtagctccatgtggagggaggaaagcctgcccacggggctttgcaatagacagggaactcagtggagacagaatccataagcctcaagaccaattttaatgtgaaactgctcaagcctacagctgtcatgttcagatttggtccttcatttctccaggcaaggatttaacaataacgttcatgtccacctcaccacaggggaaaggaaatatatgactacagtggggtctaatttcaagagggatgggccagctcccggatgcaagagggagagtccactctgctgtttagaatttcaaaaggtatcatcagcaataactgctcaaatatgatgggagaggggactagcgcgtatggccatctttatcaaattttggagcctccttttgtttctgatgttgagctataagttccaaatcttctcatttttcacagctcaacacagctaatagctgtggccaaatccagtgctttcactagctccttgagatgagagctgttattcctctactaagtatttaagcaataccttttaatttacttaatgaattcagaacaaactgattgatggcccagctcagttggcaatgacagctggcatttccctgatgaccagataatgaggcaattgcattaagtgtgtgtcaccctgatcagctggcgtggtctattaaggcagagctaggccacgtacggctttcagtcagcatccacagcctgcaggtccttaagcactctgggactggcttacacacctctgcatttccatgctgtgataaatctgatgctttctcggtgcaccttgaagaaaccaagccagtcaacttagctttggaaaagcctgtatcctgttgcaaataatgattaaaagaaacattgtgggattaagactcaggaaactgagattctagtcctaattaattaattcatccacttgacaaacattaatcgaatgcctatcacgtgctagctactgagctaagtgctgggatataaaataaaatcactattgccatgtttgctgagcatttactatgtgccaggcatggctctaagcactttcaatgtatgaagttacttaaaactcctaacaaccctacaggtaagcgctattatcatacccatttaacagatgaggaaactgaggcacagggacgtcaagtaacgtgcctcagttttcaacctcataagtggcagagccaggaacaaacccagccaaaatgactctagagatgaatgagatgcagctctagccctagagaagcttgaagtttcttggagggatacacagacatgtacacatgtgcacttaatgctctgtgattcagaaaaaaaatgtgtaacctgtattagctttctattgctgcacaaaaaaattaatacaaatgtggtgcctgaagacaacacctatttattagttcacagtcctttaggtcaggaatccaccatggtgtaactggtttctctgttccctgctccggttatcacgaggctcaaattaaggtgttgccgggtttatggcactcatctgggctcagggtcatcatctgtgctcactggttgttggtagaattcatctccttgcagctgcgggactgagatccttattttcctcctagctgtcagccagggaccacactcagcaactagagactccccacagctgcttgtcatagtgacccccataggtaattgataacatgggtatctgctttcttcctgactggctggaatgcatctctcagacttcctcttctgcaaccagccagagaaaactcttccttgaaagggctggcctgattagatccccagggatatctcccttttaccctacaatgtaatatggtcacaggggcgatgtcttatcatagacacagggtccacccacactcaaagggaagaggattatacaaggcagagtatcattcaaggtcatcttagaattcttcccaccacacttgctgagttttcactttcctgaggctagactagatgacaatgatgatagctaactatttgtatagtgattcacaatttaataaataccttttcacatgtagtctcttatatgagccttaccatccagaaatcccagtgctctaggagaaaaggttagcttcactgctcagaagaggaatataagggttagagaagttacatagcctgctccctgccatgctggtagagcatgggaaagccaagacgttaacttaagccttccagttccaacatctgagctccttcctctagcccgtgctgccatatagatccaaaaggaccagacacaagctagtgccagtgccttgactgaagtgggaagaacacaggaatcagatcttggtttgaatccaagttttgccgcttggattcaaacccattagttccaggtcttgtgcaaaccacttcctctttctgggtatcctcatctgtaaaatggggggagaagttggactacatggtctccaagggctctttcagcctcaaatcaggacaagactgtttcaactatgctgtgggagattattagctccaacggtccattttcttgttgaagaagaactgtataactatgccctcttccaggtattcctggggtatgggagaagatcagtgtattagtttcctaaggctgccataacaaattaccatgaacttggtggcttaaaacagaaatttattctctcacagctctggagacccgacatccaggatcaagatgtcagcagggttgatttcctctgaagactccaagggagaatccattccatgcctcttcctggcttctggtggatgccagcagcccttggcatcacttgccttgttcacacatcactccaatccctgccaccgtcttcacatggcccccctctccatatgtctgtcttctccttttctgtctcttataaagacacttgtcattggatttaggacccaccctaaaaccaggatcgtctcatcccaagatctttaattacatctgcaaagactatttccaaataaggtcatattcacagatactggttagggcttggacatatctttttttgggggggcacaattcaacccctatacataaattgatgtatgcatcccactagtgatggaatttcagtgctttccagtttttccattacacagaacactgtaataagcatccttattgtatctcattgagcacatggacaagaatttctctagaagtggaatttttggggttgaagagtagatacatttttaacaccactaaatattgctaaatatttttgccaatttgatggatgtgaaatggtagctcattgttattttaacttgcatttcatgattagactagtaagactaaatgtttttttttctttttttgttttctttttttgagatggagtctcactccgtcgcccaggctggagtgcagtggtgcaatcttggctcactgcaacctctgcctcctgggttaaagcgattctcttgtctcagcctcctgagtagctgggactatagacacccaccaccacgccctgctaatttttgtatttttagtagagatggggtttcaccacattggccaggctggtcttgaactcctgacctcgtgatctgcccacctcggcctcccaaagtgctgggattacaggtgtgagccactgcacccagccgaattatctttttcaagtgtctattagacatttgggtttcctctttgaatttcttttgaaaattctaaataggtggttctctgtcaggtaatcctgtcagggaactaggaatctggatgttaaaatactcaccaggggagcctgaggcacagccccattggggcacaccctgggcacatcctgctatattaaatatagtagccaatctcatgggcactttgttattatacctcagagtgcactgaggggctcgatctcttacaaaactgtgacactgcactgatcagaggaggctgttggaggatgctattcaccacatcacacaggggctcttttaagaagccctctgggggagtttctcccagcctcagtgctaggaaaagccaagcttctcttcaacatcttctatttgatctgatagatatgacctacgacttggtacatttctgtttttccttggtaaccagagagctccaaaccaaatctgtatcccattataagaactgtgcaagatctttatattatgcttttttttttttttttttttttttgagatggagtcttgctctgtcgcccaggctggagtgcagtggcatgatcctggctcactgcaacctccatttcccgggttcaagcaattctcctgcctcagcctcccaagtagctgggtttacaggcacccaccaccatgcctggctaatttttgtatttttagtagagatggggtttcaccatcttggccaggctggtctcaaactcctgaccacaggtgatccaccttcctcggcctcccaaagtgctgggattacaggcatgatatattatgcatttctagatattaactttccccagatttttttaagagatggagtctcactctattagccatgctggagtgcagtggcacaattactgttcgccgtagccttgacctcccaggctcaagcaatcctcccacctcagcctccccaatagctgggactacaggtgcatgccaccacgcctggctaattttgtttattgtttgtagagacaggatcctgctatcttgcccaggctggctttgaactcctgggctcaagagatcctcccaccttgacctcccaaattgctgggattacaagcttgggccaccgcacctggcctgagtttatcttactatatcatcttaattgctcctttgcccgaattttttttacctgaatgtcaagaaaccaaaaacttataacaatgtgtgtctttttgaaagccattttacatacttttggggaacaaaataggcataaatacatattaaaataattttacattttaccttgtgagatttaaataatataaaacttaggtgagttaagacccttacttcaaaatcgacctatttgaagatccatatatgataacatcagatctattgttgatttttaactggaagaaaatacttcaaacatgaactattcaaaacatatcagtgaaaattatattaatgctagaaaacaggtcactagctgtagccattcaggtacagaaaaaataagattgcgttttaaaatacaatactatttattttgaaatcactattattgagttcaaaaatggtgcaaaaaccattacatttatttaagatcacctgtatttcgtttagtggctttaaagcaaaatttattttcaaaaactttcacagaatttcttaaaggcaattttaacttcttatggttcctgttttgttcttaaaacaacagaaaagcatgctaatgcttaattcactgttgctccaattctttctccaagaatatgatggccaaccaattcatcccagtttgcccaggactgtccaggttttaaaactgaagtccagtgtcttaggaaccccctcagtcctgggcaaaccaggacagctggtcaccctagcaatggggcggcctccttttgccaatgtatggaaggaagagcctattaacagcaagtctttctcataccctttaaatttcaaaggcagtcatatatctgaaaggtattcctaagtgttaggaaacaataaaattctgaatttagttcacttaatatcagcctggatttcataatggattagagagactcttcacacatcaatgttcttattctcttctaaagaattccaggaaaagagattccataaagctatctttgaaatccattctgccatccataatctttttaaaatattaagtttaatctacaattatatcattttccttctcagcaccaaactgaataaagaaatcttaaagatatgctatccacaggaaatcaagtaaaattattaaagacctcaaaatgggtcaccagaacaaagttaaaagacagtgaaaaactttcttttgacttagggggaggggaggaaaagaaggctaaattctaaaatgttaagaatactggaaactttttaggatagcgggtcaagcaaagaccctcaaagccttgattataatccattctattcagcacaataatcataaatgagttcctcaaaagaaggcaaaaactaacatttattagatgtctactgtatattggttgctctcatgctcagtattttaatctccctatatgcctgttgatcaatagcatttatccattttacagatgaaacaaattagactctgagtcattcacactacactgtgctaggtgttgggtgtgcaataataaacaatagagccatggtttctgcttttgttgagcttagaatctagtgggggatgacagacacaagaactcattacaaaaataattacgagtgacccagcttgggaggaatcaaggaatgctttcctgaaagctgaagagtaagaagacaaaggaggagggaagaggtggggagagaaaggagaacaattttttctttctaggcagaggaaatggcacacagaggtcttaagattagaacactcagttatgtgtccaagattaacccaatttataaggggcagcttggggttctcagacctgtgctttctgactccaaaattcatgttccctccactgtaagataatgtgagccttggtgcttcaattctaaagaggatggtccacaaaggggaccaaattcccagtggtgacactcagtgtctcccaaactagttgatcagaagaatcacgtaaaggggcttgttaaaaaaaataaatagtccctaggtcccatccctactgggaaatcacattttaacaaatgccccaggtgattcttaggatcagacaagtttgggagatgctaagttatggctccaggaaacctaaaacccaaaacaatcgtttacttaactgcaatctcctggccaattttaagaactgggtagagttcctcgaagtaatttagcctcgcaagaagaaaaggaatgggtaaaaaataaaaacctctggaggtcaatcagccagccagtcaaataaaaatgctgcccctcctttcttccgggtttcctatgggtttttacagtctctcattctggattaagtaatgtcttcttagcataggttatgtgacttctgtcaaaacaaaactgattcccacaccaggaggctcagtaacacactactaatttccagtcatcactaattaaggacttgagtagactcacggaagcagcaagataataagaaactacaagccttggctttcagctgggagaggttatggatttagaatccaaacaacccgggttcaaatcccagacctaccacttactagacaaacatagataaattaatgaacctctctgagctgcattttcccaaactgcacatggggctaatgattacctccatcgtagacttattctgaggaataggtgagataatggagggggtggcctgacactatcaggtcattaacaaatgtttgtcaatgaataataaaacaagagtgaatttatagcccagcaagagagggactgtactaatatgtaatcagcagttaataaagacatattaaatcttaaaaagagacactcacaggcacaaagtactgattctaagctatattgcagaaaaacaggcccttcccagtgtacagtggattgaattacagtttggttctctgggtaggacgttcttaaatgggggtggagtagaaggagggggagtgttaatgtgctaattttgttcttaggtaatagatttcctggaagctgtaagaactgaatgcatgttccaaaaatgatagcagactacagactgaagtgacaccagctcaaaggctggtggactggggagcagagtgttgttgttgttgttgttgttgttagtggtggtggtggtggtggtggtggtggtaggcttgtagggtttataggtcatcttagtgataataatgtcatccaatttaaaaagtgctttaaatgatttccctttactaagagagagaagacacaagaagagaagtttaatcaaaggtgcagggggtggagtgggagacaacagggaaggacaaaaaaaaatcactgagccagagtccagggtcacacagacagcaatcttgccttagaactaaggggtggagaccacggaaagatggaaaccagcagagctgactgtgaagacaggactggtcacctgagaattgctggatccatgactttaggactaagcatgctaaaaaccaagtttggggccataacagacatgactccctttctccactaagcttagagaggccacagaatctctcagaagcactgcaaatcagcaaatgtctacacaatcggtaaaacttatttgatatccaggaatgttctgctgaatcccctaattaagtccagagtagtatggtccgttttcatactgttatcaagaactgccccagactgggtaatttacaaaggaagaaggtttgactcacagttcagcatggctagggaggcctcaggaaacttaaaatcatgacagaaggggaagcaaggcaccttcttcacaaggcagcaggaaggagaagtaccaagcaaaaggggaagagacccttataaaaccatcagatctcatgagaactcactcactatcatgagaacagcatgggagaaacttcccccatgattcaattaccttcacctggtctctcccttgacacatagggattatggggattacaattcaagatgagatttgggtagggacacaaagccagcccatatcataatgacatcaagacttgagttcaaatcctagttctgcataccttgggcaagtcactcaacctttgtgaacccatccccttctttgtttggaaaacaggaataataattgcacctcaaaggatttgtaagaattaataaaataacctataaaaactccctaacacagaaaagtcctcaaatgtgtttgcttctctaccactcaaaacaaaaacaaaagaggcactttgtttctattacggtgaatctgacttctttgacaggtatgggcttcggaaagctggtagacaacttattcatgtgggaagataaactaagagtaggtttgcattggtttataaatctgccaatattactgctgcagaatctaaatccaaggcaccatgagaagaggatacaaaactctatgtgagcaaaagattttttatttattaatttatttgagacagagtctcgttctgtcacccaggctggagtgcaatggcgcgatctcagctcactgcagccaggatcttctgcctcagtctcccgggtagctgggactacaggcgcccactgccacgcccagctaatttttgtatttttagtagagacagggtttcaccatgttggtcaggctggtcttgaactcctgacctcacgtgatccacccacctctgcctcccaaagtgccgggattgcaggtgtgagccaccatgcccagcctgagcaaaaggttttaaatgtaaacaatgtacttaatttcccacttcttatgacaagccaaatctcaagtcctaattctttcactccacaatagttaccagagtgaaaacattccaaattttataccttagttttgaagagaattaaatgcatgatgtcattcctagatttttatcctacgatattcttacacaagtacacaaagacatatatacaaggatatggtcattgcagctttacatacagtggtaacaccctgtaggtagccaagggtgtgtcaatagggcattaattaagtaaatgatggtacatttgtattatggaatgtgatgtagccatgaaaaaggatgcagtaaatcaatatataacgatacaaaacaatagctaagttatattactaaattatataaaaggaacagaatcgagtggattatattaaaacattaggtacataaaaagggctatttatacaatatatacctagatatgtatacctctggaaacagaccaagaaaactgctccaggtggtttgcctctgaggaagggaactataggtgggatgtactggtctactatgtaaattcattatcacgtgcatgttattaaattgctaatcaataaaactgggatatacagtaataataaagataaaagtccacatagtattaatagtaatagttatattgttggatacttattatgtaccattgggactgttccaacattatctctcaaccctcctctaaggtgggggttattataccccatcattcagctgaggaaactaaggctcaaagaagttaaatcactcacccaaatgcactcagctagtaagaagcagagcctgggtttgaaggtgattttggccgactccaaatcctgcgctttttctacactgcattgtggcagatactggggggtgttcaccgaaatccatttcctcttattcctggacaaaacactgggctacattccccagtctccctggcacttgggtgtgaccaggtgcctgagttccagccagtgggatgggacagaagtgacatgcaccacttcctgggctcacttataaaaacctcctgtatgtgctccttcatgctctgtccccttttgctgcctgggtgtgggtgatgcagagaccccagagaatgacagagccacagatggacggatcttgcgcccctgaatgacgaccctgccaaggtgaaagtggcgcatatcacaagagtaagaaatagacttccagatgttgagaacttacacatttgggcctactcgttacaaccgtttatcctactcaagtgaatacacacagtgaacaaagaaaacaagagaccaagaaatgcaaaacccctttgtgttcaacaaatcaacattgagcaactcctgtgagtcaggcactgttctaaggggctgggaatacagagatgaatagcatggtccctacctgtgcagtgggagactccccgagtacttaagccctacctcctcaggctaggtcagagacatttcaaagcaaagcgtgcgtggccagttttcatttgttcactgctagtcagccaggggttcaggacagaagacaagaaaggctggaaggggctgggcatggtggctcacgcctgtaatcctaacactttgggaggctgaggcaggcagatcacctgaggtcaggagtttgagaccagcctggccaacatggcaaaacctcgtcctactaaaaatacaaaaattatctgggtgtggtggagcatccctgtagtcccacctactcaggaagctgaggcgggagaatcgcttgaacccaggaggtggagcttgcagtgagtgggatcgcgccattgcactccagcctgggcgacagagtgagactccgtctcaaaaaaacaacagcaacaacaaaagaagggccagaagggatgggactccgagggagtggagtctggtcactctcccaggtgagggtaggtgaagacccctgctggacagccccagagaagacccagcagtgtgaccccacacaaaaacagcctttcctagaaggaggccagaggacagagagaggagaataataggactggacttgctcctgctcatcatggcaccgctggccccaccttatacattctcacattctcctgggtcacaatcccttccagagcacctactctaggccaggcatagagaatcacacacacacacacacacacacgcgcacacacacacacacaccagaacactatctctgtcctcaaacttcttagggtttagtgagagacacggctcttaagcaaatcattatcccccatgaagagcaacatatagagggagggacacaccaagggctctgacaagacaggaagaagtggctccttctgcagggcaggtgaggcttcaagatggagctcataactgagctggatattgaaaggggctccaattcagccagcagggagtcagggtaacaaaagttattccaggccaagagctctgtgtgagcaaaggttggtggcacaactacctcgggctgttaggccacagcacaacagggggtgggggcagtggcaagcctggcaggggtgaggctggctagggagggcttgaggtgcttttccaggacatgagcaaaaactgagtgtgagaacatcaactccacagccctcatcccacctgaggtaccttgtcccctcggcccctgcagacaaagttgtcatccagagtctccttttaaatgtgacaccccgaggaagaatcacaacctgattcatctacctgctcattactacccagcaaaggtcttgggatggactcaaaatgatcttccagtagggctggacgagtgtctctgaggggacagaggaatgaaggagacggaaggacagacaaaaggaatgtgatgaaagggtagcaaaggccagcgctcccctcctcagggcaggaagaacctaccagccttcatccggctgtgtgtgcagcatcgtgccagggtgtggaggcagacagaggggttcctaccttcgggcggtgtatggtgtacacgggcacaggctgctgacctccctgccattcagccttggcacgaaaagcaatcactgcttgtcttatggagaggacaggctccataggagggcagcatggtatcatggaaggagcaggcaccgtgtgatcagagaccaagggctgagaggatagttctacctctaactggccagtgtctcgggcactccatttcctcacctacaaaactgacagcacagtctctgcttgtcagtgttgctggaactttttaagcaagaaaactaatgcaaaagcatctatccagtgcctggcttagagtggaccccatggcttgttcccttccccttaggagagggcgtgcatgtgaatagtctctttaggattttacttccacacggtctgaatttgatttaactctgtgttttcctcctcggtgaggctgaaatatgtcattggttacttaatggcccttcaagcaatgaggcctttattaaatagcagcatgatacccaggcaatgagaatgcgagccgcacacaaatctctccccgctgctttggtgaagaaagctttcagctgccccctgggtcgctgtctctctctgcctggaaggagatgcaagaaagggggcaccactgcctagaggggacaagtgagatggccctctgtggctggaaacctggagatgcctctttgggccactccctcagcagaaaggaggagggtggtccctagagaggagagacaccagcaagcctcgctctccccagcactgctgccgccccccagcccagcccctaggtgcagcacgggatgaaggagaaggtgcttgacctgccacccacaaagattgtgtgaccagggacatgtcctctggtcaggcctgatcaggtacctggcctgaaaagtggaactaatgctattcccctactcactcagagggttgcgggagactcagtaaagtgacagcggtgattctgctgccattctgcaataaaggactcttgaatcctaccttgctgtctctgcagattgactccatcacaaagcatcacttcagtgcttactggacaccagctgctcgccagatgttagagactgaggaggaagcaatgctctctgccctcaaggagggtgtccccacttccaactcaccactgcaacccctaaatacactccacaccatagccagatgggtctttctaatatacaaatcagatttttcacacacagacacacacacacatacacccctgtttaaaaccttccagtgtaggcctgcatgatggtatgcacctataatcccagctactcagaaagctgaagcagaaggatcacttgagctcaagagttcgaggccagcctgggcaatatagcaaaacccagtctctaaaagtttaaaatagataccttccaatggctccctagagctctctgcttgcagctcagttctgtatgacttggctcctgcatacctctctgatccattcccttcactctcctcccacatcctgtgatccagccggagtaaaatgttagcagtcagccaggtgcggtggctcacacctgtaatcctagcactttgggaggctgaggtgggtggatcacttgagctcaggagttcgagaccagcctggtcaacatggtgaaacctcgtctctactaaaaatacaaaaattagcagggtgtgatggcacacacctgtaatcccagctactcgggaggctgaggcaggcgaattgcttgaacccgggaagtggaggtttcagtgagctgagatcgtgccactgcactccagcctggacaacagagcaagactctgtctcaaaaaaataaaagtttgcagtctcctaaacacccagtgttctcgcttgccaccatgccacaatccatgctgagcccctgccccctgctaccttgctcacccctcatcctccagatccagctcagaggtgcatcctagaggagaacccctctgacccttaacctaagccagccgtccctcccctcctccttccctgtaacatcgcgcttcctacaccggatagtaataagcagagagggagctctccggggaagggacacacagggtgtcatttctttgtttgcccgtgcttggcagggtccatggcacaaagtaagggcttagaaaatgtttgaggaatgaatgagaaaattacttcagccaatatttatcaaaatctgattatatcgtctatcaggcattgtgcagtatgaggatccaataataacaataatgaacaagacagatgtggcccttgcacttattgaatttaaaatctggtgggaggccaggggtggtggctcacacctataatcccagcactttgggaagctgagataggcggatcacttgagatcaggaatttgagaccaccctgggcaacatagtgaaaccccatctctactaaaatacaaaaaattagccaggcatggtggcatgcacctgtaatcccagttactcgggaggctgaggcacaagaatcacttgaacctgggagccagtggttgcagtgagccaagattgcaccactgcactccagcctgggcaacaaagtgagactccatctcagaaaatgaaataaaataaaataaaatcttgtgggaaagaaagaaaatcaaacaagcaatcatcacaataaagttgattcatgctatgatggggtctgaaggagcacaaagcaggagcatcaacccaaggtggggaaggaaggagctgggaaggcttcttaaagaaagtgagatttaagctgagacctgaagacaggggaagttgtaggcaggcagaaagaagatcagatagtctatctaaagatagaaacacctcaccaatctggaacacagctatctcatgtatccagaaagtagccagaaccaggaaagaaggcttaaaggctacttacagccaaaatatgttaaaaaggccatggcccttacttgcccagaagcctctcattcacacaagcctttctctacctccaggctgacctcatcttgccttcctctgtcacccaccatatttgtacatacttccaatagggctcttagcagcccacagtggactcatcagctacgtctgcttcccccagcacagagcatccaaggccaccatgtgtggctttttaagtcatgtacaagagtgccatgatgctggccgggcgcagtggcttacacctgtaatcccagcactttgggaggctgaggcaggtggatcatttgaggtcaggagtttgagaccagcttggccagcatggtgagaccccatctttaccaaatatacaaaaaattagccaggtgtggtggtgcgcacatataataccagcaagttgggaagctgaggcaggagaattgcttgaacctgggaggcggaggttgcagtgagccgagatcgtgccactgcactccagcctgggcgacagagcaaggcttcatctcaattaaaaaaaaaaaaaaaagagtaccatgatgctgttcacaggtaaacatctttaacactttaacatatggaatatttttacaattataagctgtataacaaatggattattcatgataacaaatgtaagttattgtataacatattgtcatcatgaaggtacttgttgatttaaactgggaattgagaaatattttggttttgtaaactaacatcagatgattttatatttgggtggtttttttatttacaacaagaattttctggcaatggcagtcatgtcttattttaataagccagtatgtattgttcccctttgacaaattcaataatcaagagaccatgtgctgggcattgtggctcacacctacaatcccagcactttgggaggctgaggcaggaggattgcttgagaccaggagtttgagcaacctgggcaatacaataagactttcgtctctacaaaaaaaaaaaaaaatagctgagtgggttggcatgagcctagtcccagctactcggaaggctgaggtaggaggatggtttgagcccaggaatttgatattgtgccactgccctccagcctgggcaagacagcaagacaccctggtctcttaaaaaaaaaaaaaagaccttgttgatgtaatcatatctaaaatagtctgtgtttctaaatagggatctgctttgacatttgatagatgattgatgagtccctttaaatttttttaaaaatccctcattggtatcagattcacattcatattgtaattcaataatctgctgtttgcttactgtggcagaatatttttgaatttcaagttcaaatcaacaatactatataaatattaataaccaacattcatttatcattaataatccattattgtaacaaatttgctattgatatgtaagtactatattgatgaatttaatattctttccttgaggaatgggtccctttttctaattcacacaaaacatgatgggcgagtagggatcacagggatggtgtctgatagtgatcacccgtgccttgcacaggccttgggccacagcagacattcaacacatatttgttgaatgaataataaagaacttccaggcctcaatatatatgctttattttaccataccttctagaaatacttctgcacagttaatggaaaagtgttgcatacattcttagaataacagttcttagtgaccagctaaagcttattaaactgtcacacagcaggaaccacttgcctctcccttcgttctctaaacacagagcatttttccaaaaagaacgccttaggaggaagaagttttcatagctgtaatatatcattagaggaacatctttgcaacctgcctagagagtcataaagtttagtaatttctaagaaaatgccataaaaatccagtaagatggtaaggttttgtgtaagtaatctcaagcagagtctgagactccttaagtaaggaacaagtgcacaggctaaagaaagctatgttatcatggaaagtaaacccttccaaaacctaaggcttttgggcttacaaacagctggctctctatttctggactgggcttcgcaatgccagagacaggcatgagttcactgcctggaatcccttcatgtcatttccctttaaggaaaacagtcatttagaaggtagaaaaaaaaatcagctctagaaccattattgattccacagttcaattcaatcagcatctgtgaatgccttctctgtgccaggcactggaaggactcagagatgaaaaacaacatctttgtgatgatactcaccctgaggctgggtatcttacagtctatgggaagagacagatcatcttaatcaataatcttccccatccaccaccattctgtctgtcccagggccaacacctctctcctgaggtttataatagcatcctaacttgcctctctgcctccactcttcaagccgtctgtaagccatcctccataaggcaaccagagcgatctttttaaaagtgtagttatcttgctccctgtacatgttggcagtggtctggcctctgcatgtggtccggcccccgagtgtctgctggcaaggcaagaatcagactggaaattcccataccaagccaggccctctgaaatgccacatcctcagtgggtgaaactggaagcaaaccttctgtgttttggccttgcctcaggaaaggggaaataaaaggaataagtctctgctcagaatgtctaaccatgataccttcctatccaagtatggagtcagaattcatcctacacctataaccaaaagaaaagtctaacaccaaaaaatgtagttttaagtgttctgggtagtagagccccctgaggcatctgtataaaaggaagattctaacttgaaacctaagcctcaaagaatgatcagcaagtaaagttccaaggaacataagatcaccatcaaaaaaaaaaaaaaggcctaacacctaaatcagaattccaaaaagacagaagagagtggatgagagacagtatttccataattgataagacaccaaacctcagagacaagaatcccaacaaatcccaagaagaataaatcagaagaaatcctcacctagaaatgtcttactgacagcgaagacatctaagacaaagggattttaaaaacagccagaatgaaagacattttactagcagaagaaaaaattagactgacaactgacttctcaacagcaaaatggaaatgaaaaaacagtggcatatcttcaaagcgctgagaccctatagctatcaacttagaacagtatgtacagcaacactatttttcaagaacgaggagaaaatgaaggtaattttggacaaataaaaactgagtttattaaaacatacttccaagagaaaggaaatgaccccagaaggtaggtctgagttgtaaaatagaatagcaaacaaagaaaatggcaaatgtgggtaactcaaaaggacacagactatataaaataccaataacgcctaatttgtgaagttcaaaaaagaataagataggactaaaatattggacaacaaacgcatatatgttggaagtgatgtggccaaaatgaaaaagcatactaaagatccttgcattgttaaaaagagaataaagacagtaaccttaggctttgtgaaattatacacacatattaaattttctagggtaatcaatagaagaataaaaatagaatatgtaacttccagactagtgcagggagaaaatgaacaagaaaaaaaatcaattaaaaaagatatgaaatcacaatcacagaagaaatttttaacataactcttaatagatcagacaaaaatcagggctataaaatttatataatacaattcacaagttaatctaacacacatatgtaaaatattggacaaaaatcagggctacaaaatttatataatgcaattcataagttaatctaacatacatatgtaaaatattgctttcaataactagagaatgcatgttgttttcaagcatacatggaacatttgcaaaaactgaccatgtattagaccataaagcaaaaacctgcaaaaaaaaaaaaaaaagatgggaggaaggaggaaggaaagaaaaaacatcctctaaccacaatgaaattaagttagaaattaataacaaaaagataagtagaaataaccttatttgcttagaaatgttcttgaaacacaaatctaaataacccatgggtcaaggaagaaatcttcatgaaaatgtaaaatacatagaactacaaggtgattttttaaatactgcataataaaactcataggtgtagctaaagcagtagttagaggcaaatttgtagtcttgagtgcttttattagcaaagcagccaacttaatattggaaaaagaacaacaaaataaacctcaaaaagtagaagagaagaagtaataaagagcagcaagccatgaaatagaaaaaaagatacaatggagatgatcaataaagtcaaaagttgcttctttgaaaaaactaatcaaattgagatacatataaaatactctaaatgacccaaggaaggggacttagcctagcctggggcatgtgtgtgggagtcagggaagatatatggaaaagatgaggtaaaacttaattcttgaaggatacgtaaaaaggtagccaaacaaagggagggagcattcagaggaggaaaaacatgaacaaaggtcaagaggaatagcacagcatgaaggctcaagcaaaccacatgcagtgtggtgtcagtagtgcataaagttcaaggaatatgggaaataagcctagagaaggttagggccaagtgttaatttttttaaatattcaactgagtcttcattatgtacttggcactttacatgattatagctttttatgctggcaataaataactccatgaaatatggttgtattatgcccattttacagaaaaagaaactgagtttcagagcaaaatatgccaaaagctacacattgagttgtttcaaacccctatctgtgtaggtctaaagctcatgcttacacccaccaagacataatgcatcttgggttgtgaaaagcatcatatggagccttcataaggagtctgaactttgttcttcaggaaaatattcaaaatttccctgaaaaaaacaaagctcattcttacgaagaaagtttagagtactgttacagcttccatcaggttgcatactaccttatggtggacatttggattgtttccactttctggctattgtgaataatgctactatgaacattagtgtacaagttgttatgtgcacatatgttttcgtttctcttgggtttctcttgggtatatatcaggagagaactgctaggatgtttaacatttgaggaactgccaaattgtttttcaaaatggctgcaccattttacagccccaccaagagtgtatgagggttccaatttctccacaaccctgccaacatgtactatctgtcttatttattatagataacccaataggtatgaagtggtatttcactgtggttttgattttcatttccctaatagctaatgatggcatatgacattttaatgcagctcttaatgtaaccccctcccccttttttttaactccagaaatattttgacaaaacctaagaaatcacctatcaaaactggctgggtgcagtggctcatgcctgtaatcccaacactttgggaggctgaggtgggtggagcatgaggtcaagagatcgagaccattctggctgacatggtgaaaccccgtctactaaaaatacaaaaaattagctgggcgtggtggcgggcgcctatggtcccagctactcgggaggctgaggcaggagaatggtgtgaacccaggaggtggaggttgctgtgagctgagatcgcaccactgcactccagcctgggcgacagagcaagactctgtctcaaaaaaaaaaaaagaaatcacctatcaaaacttttggcaataaaactgccaaagtatgtgaaatgcttaagccctacctctgggtagaagatcagggatgacataaggagttagaactaatgagaaggtcaaggatgagccaggcacagtggctcacacctagaatcccagcactttgggaggccgaggtggaaggatcacttgaggctaggcgttcacgactagcccgggcaacatagtgagacaccacctctttttattttaaaaataaaaaaagaaggtcaaggataaagagaaagccaagcatgtctactgaatacattatttgaatattaaaaagagtgagtttacattgtgatatggctgtttcaaattaggcataatggccacaccaaaatagccatatcaaaatgccccactttgaactatgcacttatgattagaattaagtatttggtgaagacagggcccataggttggagaagattcatttgtttcactctcttctccagtatttgtcattatattcttcaaaagtaagtatttataggaaccctcagagctgagcataaattgctaaaactattttggaaagcaatttggccatatattccaaaagccttaaaatgtatattccgtgtggtctaattatttcatttttggaaagttagcttaagaaagtaatatgaaatatgctgggtgcagtgacgcacacctgtaatcctagcaatctgggaggctcaagccagaggatcgttgaggccaagagttcaagaccagcctgggcaacatatggaaaccccatctctacaaaaaaaaatatatatatacaaaaattagctggcatgggggcgcacacctttagtcctagctagtttggaggctggggtgggaggatcacttgaggccaggagttcaagggtgcagtgagctatgttcatgctgctgcactccagcctgggcgacagagtgaaaccttgtctctaaagacaaaaaaaaagaaaaagaaaagaacatgaaatataggaaggaagcacattcctgaataatttttaatagagggttcaatctaaacatttaataccaggaaaataaataatgaaatacaacccacagaatgaaatattttgcagcaattaaaatgacattaacaaaaagttgtatagcaaggaaaaatgtttaaattataatgtggacattaatgttaatgatacaataaaattgtatcagatttgtaaaacaaaaaaatatatatgcccagaagaaatactggaaagaaatgcttcaacgtgaaagcagtcattccatctcaatggtaggactataaatgttttaaaaatattttttccaaatttttaagcaatgtacaaggattatttatataagtgagaaatgtgctttttaaataaaaccaacgtccaggctcaaagcccagtcctgcactgaaggacttatgtaaacactaactgtgatgttcttatttctaaaggggccaggaactcacgctctcttcagaggagcaatacggtccactagaacaagacctggcctacaagccaggagagccagcctctagatctaagctgtgtgtctcttaacacctctgaagagtggaagagttgaaagagaacaaacactgattgcgtactgactttgccatacatgttacctatatgattaacatggaataaccccctaagtaccatgatgccccatgtgacagaactaatatgtggtggggattcaaacccaaatctatagatgcagggacatctgtacaacagaaataatgaaatctaccatacttactgcacaaagccaaagtcatgttagataaatctatgtgaaagtttcatataaaatatccagttccatggatatgtaaaactctaagcctctccacacaatctcttaattcactgggtatttcacagcacctgaaggcagaattctgtgtttcttctgccttcttgagctaacaagtcaaaagtaattaaggactgtttttagtgaatgagaagaagaaattttttaattgtaatgtggatcatgcaaggcaaatgattatttggtagacatttaaataaccaacagggggaaatatttacaatgcatatgagataaaaagtaaccataatatttacaaaccaatgagaaaaaacataaacaaaacaatccaaaagataaaatgaacaaaaaatagattcagtcatttcacagatgaagcaagacaaatgacaaattaacttatgcaaaaagtttaaccttgttgacaatcagagaaatgtaaattaaaagaacacatttttacctgtcagtctggcaaagatacacaagatgaatagtatacagtattggagcagatatgcaaaaacaggcagtctcaaaccctgctgagggcaatttgatagtaacaatcaaaatataaagtacatatgccctttcacccaacaatcctaggaatttattctacagaagtatttgcacaaatacacacttaaaatgtctgaaaaggccaggtgcagtggctcacgcctgtaatcccaacactttgggaggccaagggaggcagatcacttgaggtcaggagttcaagaccagcttagccaacatggtgaaaccccgtctctactgaaaatacaaaacagctagacatagtggcacacacctgtaatcccagctactctggaggctgaggcacgagaattgcttgaacctgggaggcggaagatgcagtgagccaacatagtgccattgcactccggcctaggtgacagagcgagactctgtctcaaaaaaaaaaaaaaaaaaaagaatctgaagagtgatgtttattgccccactctttgtaatagcaaagaaaacacatagaaacaacatccgtcaataaattatggtatataaaatggactattaggttgttaaaatgaaatgaatctatatatattaacagagaaagatgtatatgaggtactgctaaaacagcagttgccaaacactatctacgtggtataactgcagcattttaaaaaatgaaatatctgctgggtacagtggctcacacctgtaatctcagcactttgggaggctgaggcgggagaatcacttgagcccaggagactagcttgggcaacatagcacaatgctgtctctacaaaaaaatataaaaaattagctgggcatggtgtgcacctgtagtcccagctcctggggggcgagggttgctgaggtgggaggatggtttgagcccaggaggtggaggctgcagtgagccgagattgcgccactatactccaacctgggcgacagagcaagaccctctctagaaagaaaaaataaaatatgtgtatatttatatttatatacagtatatatttgtatctctacatatgatatcatgatggtaattagcacagtttaccaaatagcctgattctcctctttacaccctcatggtgggactgcgcatcccccatccctctgaggttagccatgaccatgtaacctgcttcagcgaatcaaatctgagctgaagtgatgcatcacttctgggtagacgttttaaaaaccagtgcaaattcaccaccacatgctctttccctccctcagtgactcatgaaagcaggtgtcacaatgggagaccacgatctcaataaccaagatgatgagagacccctgctccccaaccccaccagcccacattgaacccaaagcatgggcaagaaataaactttggttgtattaagccactgctattttatggttcttaccatagcacaatttagccatcctgatatgtacaagaataagaaaaaaatctgggccaggcacggtggctcacacctgtaattccagcactttgagaggacaaggaatgcagatcacaaggtcagtagttcgagaccagcctggctaacatggtgaaaccccgtctctactaaaaatacaaaaattagccaggtgtggtggcatgcacctatactcccagctacttgggaggctgaggcaggagaattgcttgaacccgggaggcagaggttgcagtgagccaagattgcatcactgcactccagcctggctgacagagcaagactctatctcgaaaaaaaagaaagaagtctgtaaagatacatatcaaattgggattctggtgtcacctctcagaagtggaattagaggggaggatggaaagggagggggatggggtaggtggtttgtttcagtttttattttatatgcttgggaacagtgtaaatttttataagcatatattatttctggaattggaacgaagttatttatacataatctaagatgtccaaaaaatggtccactgttgttttttaaaattccaataacccacagttctgacacaatgagaaatagaatctccctatgagtataaagaacaaaataggaaaactggccttcatcagagttctaggcagatgtactgaggaacttatttgaaaagcaaaaccgcacccagggaagactacacaggagataaactgcctattcttccagcttcattaagggtgcgaaggttttattcagatgacagagaagcatatgggagagggaaggaagccgccagaaatgcctgcaagtacttataaagcatttataaaaattactagataatggttcagaaacacccagggaaacaaacacgcatgcaaatggcagcggcagcagctggcaaggcacaatttgatacgaggaggaaggagagatgcaagtcctcctggaatagagaaacctaatcgttctctccagcaaaacaataacctctgtggaggaatctcagggacgtgactcggcttcagaggaacaaccacaaggaaaggaggggttcaaacctaattagaggatggcaagctgatctgcctgttcacatcatccatttttctgttacaaaatttaattaagatgtcatagagattcaccagagggaaagtcaaaccaacatgtattcttactttaaagtgccaggcgcttttaagattttctggcttcatcctcacaacaactagctagtattttatactcagtcttagagatgaggtaaagcaacttgtccaggggcacggagccactgcgtgacccagaaaatttgtatcttttccacacagctggtgggtactttcatgtagaataacatctgttttccctgtgaaacccaaagtcaagatactgatgtcacttaaacggctaaaacgagtttcccgtggcgatgtacataattaacataccaacgtatgagacaggccaggcgcggtggctcacacctgtaatcccaccactttgggaggctgaggcgggcagatcatctgaggtcaggagttcgagaccagcctagccaacatggtgaaaccccatagctaccaaaaatacaaaaattagctgggcatggtggtaggcgcctgtagtcccagctactcaggaggctgaggcaggagaatcgcttgaacccaggaggcagaggttgcagtgagctgagatcgcaccactgcactccaacctgggcaacagagcgagactccatttcaaataaacaaacaaaaaacaaagtatgacataggcaccaggtccagaatggagactttaaaacattcaattagacttaggaaactttagaagtataattgatttaaaaagaaaaaaacatgaaatcagtattattttttaacatcttaaacctagactacatcaagttgacattcacccaaaatgcaactgtcccttacgctgcagccatctgtgagtggctgtgtcatctgctgtatccccaagatcccaaatacagcctggcacaaagtagatctcaaaatatctattagataagtcaaattagctggtcacacctgctctgactaaccaataacatacatatatggactacattttatattaaattttccccctgtttaagaaaaaatagatcaaataaccaagcctgtaattacatgatagaaagaaaacaatcaacactgaatacctacagtgtgccaagcattgggttaagtcaatttacatacattccctcatttactctcacaaaaattctgtgagatagatagcactagcccattgctacagctgaagaaactgagtctcagagaggttctgtatttagtacagagtttagtcacacaagcaatcagaggcaaggattttaacccacatctgtctgatttcaaagcccatgccaactacaaaatacaacacttccccttgagagaaggcacttaaacagtggtcgattacttttacaatacgttcaagaacagatttaaataaaaaataaaatgcatgattaaatttttgccttaaacttctgctgatacaaaaccagaatccaaaacactaccaaaattgtggcacaatacactgtatgttttataacacagaaaacagcctaaccattacaacacctgcttaaaaacacacagacacgattttaatttataggagttatagagcttgaatgtgagccccttgaatttattgtcttttaaaggactgtttaaggagttggtgtggattcatgaagctattacccgaattgtatcgttcaaataacaatggtagtgaattgtgatttttatgttatgacaagtttaacttgcaaaggaaaaattccaatagattagacattaaaataatgtatctgtggaaggagaacatttgatggagtagggcatatagtgtttttaaatatggtgctttttttttaaatgggcagtaagttgcaatggcggtcattgaaaatagaaagggaggaaagattagactacccaatatttcattttatactctaccttcttccagaaggaatctgagacagaaagattcaaatagcaggctcacattccacagaggaggaaggcaacccagctagtcaaatggcacaggaattgcatctcccctgtgggcagcagcaagacaggatttggaaggtgcaggcaccaaatgctccctctgccaggcaggatatatttcagtgtgttttattttaagtcctatttgcattattgctctcctgattctgaccaactccaaggtcacttgaattatgggtcaaatgaggaatgggagggttaagaagtagagaatcataaaacacttaaaagtgggttttggaacaaaaaaaggctactgtttgaaccctgactttctcacttacttgctgtgcccacctcagtttcttctgctgttacttgagaatagtaatgatgatagtgatgataatagaataactccttgcagaatggtttttgcaaaggattagcaaagaagaaggtatatgattgaaaactggctacaagcccaggccctggatggctctgccactggttatctgtgtggccatgggctggccctgtaccggcccctctctaagcctcagttccctcatctgtaagttgaagatgacagtgcagtctattttagagggtttttgcaaggattaaataaataatgcatagtaaatactcaatacaatttttttttttttgagacagagtctcactctgttatcccagctgaagtgcagtggtgcgatttcagctcactgcaacctccgcctcccgggttcaagcaattctcgtgcctcagcctctcaatacaatttttcacgagcataaaacagtacaatgccttgcacataacccctatttaataaacagtaactaatattatacaagttgtaagtaggacaatatagtaagtgtatacttgttctaaagaaaggctggataaatttcagggaacaatgcatgatttggagtctctgaaacaaagactttatactataatagatctcaggacaggggcttattcaaactatcatcaacaaaggtcccgctatgaaatctctcagggccctcattcacattagctggtggccatggcaccactgtgcacataaacacaacctacatctccaaagagggcagctcacaacaaaagtggcgtctactctctatggtgtctttcctctaaggtgttttttcatgagggtagcaaaatgacagaagcatccatgggagatggggagtcttcacaggatgggaagaagaccatacaaatccataaacattgagcatctgcggtgaaccagaaaccatgcctttctttcatgttgcaacatcagtggtgactctgtaaacatgattttgctatttgagagtaactccagtcttgtctacaagtttacagagctaacatctgtgatccttccctttcagaaacaaatttaacattgtggacgcagttaaattagacctggccagaacgggtatgactgcaaactgaatcatctgagggctggcatggttcacttgggactgaaggagagtgggcaagggaggccgggtctatatatggcaagcaatctgtgattaaattcagtcagaagcgcaagcttcttggcatggccttcaccatgctctgtgatctggcttcttcatcgctctccactcccccatatgctccctcagctgccatcatcccatcctgcatgtaaaacctggtccatactgcctgccttgttgttcctactctgtatggaacatccttgaatcactcacctcccagaccaaactgtaactgtttgtttgcatgtattcctcctcctacaccaggagctcctggagggcaaggagtgtatcctgttcacatctacatctgcgacctccagcccagtgtttaccaatagagagcacagaattgaagcctggtttcaaatggaatgcatatttcaaatgctagctctgtcccttactagctatgtggcctcaggtaagttaacctctgtgtatttccatgttctcatatgtagaacggacacaataaggcatttactttactgagctgttgggagaatcaaacaattgtatatatgtagagcacttaaaacagcacctggaacagagtaagagctatataaagatttattatcatgttgttgttgttgttaaatatatgtggaataaggaaaagtgaaaaaggagccaggggtggtggctcacgcctgtaatcccagcattttgagaggccgaggcaggcagatcacttgaggtcaggagttcaagaccagtctggccaacatggtgaaaccccatctctattaaaaatacaaaaattagccagggatggtgacacatgcctgtaatctcagctactcaggaggctgaggcaggagaactgcttgaacctctgaggcagaggttgtagtgagagtgcagtgagccaagatagcaccactgcactccagcctggatgacagaacgacaccctgtctcaaaaaaaaaaaaaaaaaaagtgaaaaaggaagcgagattgtgtgccctgcagctgagcaaacttctgaattcacatgctggctcagtcctaccctgttaaagtggacggtgatatatagctcctcactatgcacccataaaaggagacacagctctcactctggttggtgttcatgaccttatttcttacctgggctactcatccactcccaccaaagccagccacctgagtactccccaaacccacagcaacacagcatgggctgcaagagatactgttgctcacacccttgcaccacagcccccagtagaagttcttgctcctaaaacagcgctgggagttcaagatgatctcatccaatatcacctcataacagatggggaaaggcaggcataagaaaggtcatgtgtttgcactttgttagtaccagggatatatatatatgttagttttcatgcagtcaactttgtaggaggtactaagaatactataatcatagtttaaagcaggaaggaactttaaagtttagctactctggcacttttcaacctccacactagggtgtcaagatgtgatgtaagctctcttgcaaatattccataattcatttgatgaatatttattgagcacctagaatatgctgtgcattagggacataagtcagataccacccctgccctcaggacttcatgcagtaatgaggaagggtgacagtaataatcacaagcctaatagtagagtcttattgttgcaagtgaattgtttttttaattttcaatattttttttagagacagggtcttgctctgtcacccaggctggtgtgcagtggcacaatcatagctcactgcatccttgaactcctggactcaagtgatcctcccacctcagcctcccaagtaggtggaattacaggcatgagccaccacattcagtgaattatgttttaaaatatactagaataaacatctccacctatatgccaatgtgttctctgagtgggaaaaaaagggcagggttggaggtggaagaagcagttacaggtagtgccttggaaaaagcctacccactgggggtgaccagtgcaacagtctcatgtagatcaacattaccattatgcggctaccgaagtagagagtagatcaacattaccattatgcggctaccgaagtagaaagactggaaactgctgaattagctctgtccacccctactttacagataagcaaactgaggcctcaagggtttaactgacttgccctgataaatggaagaacatcaaaattctgttaatggctcacatagccttcctccccaaaacaggtccaaatcccatcgcatggcacatgatctgatccctgctcatttctgaagccccatctcttaccactccacctcccacgctatgatccggccatactcaaagtcctgaaagggcctctgctttgcccacaccactcctgcaaccagggatccaaagtccatgaccctaaataactccagttcattttcagcactcacaactcagctcgggtttatttcctccaggaagtccttcctgggtgcccctcctctacctcccgcagcatttctcctttcacacagaaacactcatcacataatgtattcattcattcaacgaatatttattgagcaacttctgtgtgccaagtacctgcgggtacagcaataaacaaaacaaagcccctgccctcatggagcttacattctagtgagggaaacgacaataaacaagcaatacataatataatgcctggcgaagtttagtactatggaaaaaaaataaataccaagggctggagattgatggggaaggtatcatctaaagaagtgacaagagtaagccatgcaaataaatgaaaagggagaatttcaggatgcagcagcaatgtaatgacctgtaatgaccgcaattattcctttacttgtgttttattccctattgaaccatgaagtccttgggggcaagggtcacatcttaagtatgtttggttcccagggcccagcaaagaacttggcacctccaaagtggacatttacggaatgagtgaacgaacctgggctgggatgtattagtccatctggccccatctctccgagcaaacgagatctggcctgctttatgtctctctctcccacagggataagctaagtggaggccccacttgggccaatctgcctagcctgactccatagcctggttttatttgctggattctcccttcattaagaccacggcactgacaagttgtccagttgtaccttttctagccctcatatctctggcctggacctggggccctgcctagaaacccagatactttagaactgagagcctgcctttgttttccccaagtttccccagcatgaaagttcccctctgaatcccaagccccaaggctgggggcccagacacttggagtcaaacttccccaacggctacaccctatccacctggaagtcggttctgcctgatccttgacttccctccaaaccaaatgcactttttcctattgggacatcaaccctctgaccacatcagtcctttctgtggccatctctctgtatgttccaacttaatgaaaccattaccgagcatctaccatagccaaggcacagggctaagaacctgagtcctctgttacccgcagcagatccctgttaccactggctgtgtccacactcagctatccttaatcaaactcctgacactcctgaaagcacattaaataccttatatgctgcaaataaagtcaaatggctttatccacgtagccaattgcaacagacacctctagagtcactggtgctacattccatcccctgccagtctaaaatgggctcagggatgataactcatgtattcattcaccctttcattcactgcttactgacacatgccgtaagccaagcctggaatataaaatacagtgcctgattttataccactgatcatgaggacagtggtggtgctggtggtggtgatggtgatgatggtggaagaagagagaaaggagaaggtggtaacgtaagttaccatttattgcagacttgtgctataaaacactaagtagtgagtcttctaatgctaacaagatgatgagataagtataattggcctcactttacagagaaggtaataggctgaagaggtgaagcaacttactcaaggtcacacagctaagtagcaaagtgtagtgagaccctaggcctgtctgcctccaaaataaaaagtgttcctctgcccaagagtcacacagcaagtgctaaacaaatataacttcaatgaagaagtgagagagcgggtccggggccccaggggcttacaagctggtggaggagacagacgtacacatatctacaagcagaggcaaatgctgatggctgagacataaaaagagctgcagggaggcagaggagtgagtggctaacttgacctggaggggtctggggggccctcttggaggaagtgattttggggggtaggccttgaaggatgagcactttgcggctgacaagcaggcccgagcgtggtgcaccgcaggagctcagccctcgcccgccgacctgacctgggccgtgccgagacctctgaggtcgtcctgtccaccccactgtgcccacgcggccgggtcgggccgggcctcacctccttccacttgagctggcggatgctgatcttcagggcatccagggaggtcctggccttggagctgtccacggtgaccggccgctgggagccgttctcgccggaaccgtggcccgagctccgcttgcagcttcggcccttgtcccggggcttcccgtgcgggcagaggccctgcaccggcttcggcttggacgggggcagcgtgggcggcggccgctgaaggacctgggtgttcccctcctcagccgcactgggctgcgccggggccggggccaggaccttgggctgctcctcccctgccttgcactccggttccccggccgcgcccgcgtccacgcggacctgttccgccaccgtctccgctgtggcctcggcctcagctttggccgccgctttggccgcagccaccgcctccgcctcccaccgggccgccagctcgctctcggagctgccccgccgcatggtgctcagggccggggccagtgccagtgccaccgccgccgccgccgccgctccgccgccccagtccgccaccaaactgccgccgctgcagccgctgccacgcgttccccgcccgagcccgttgccatgatcgctcaggctcgggttgacagcggcagtcaccgcatcgagacggggtccgggaagggacaatcgccggccgagccccagcgacctcataggcgaggctgcccacgtgaccctgcctgtcacagaggcagcggcggccatgttggaagagggcaaagagccgccaggacccgcccaccccgcggatgcgctggatctcgagggcgcagaactcggagtggcgaggagaagcgggagggcagattgagcgcgcgtggggctcgtgagcctggggactgggagtaaaaacaactacctcaagcaggaggctcagtccccgccaacactcgctgggataactctcgataggacggaggaggagccccccagtgggaccctcctcagtgcaatggatgggaccctcctcagtgcaatggatgggaccctcctcagtgcgatggatgtgagcagcccaggccctaggggagcagagagtgttccgctgaagaaaccctctgctggtcctttgagcgcccccagataagaggggaggcacttttccctgttctcagggagctcccgatgggatggggaagtcatgggcatgggtaagccccctatagattcccactcgagttgaggatattaacgattttttctttttcttttctttttttcttttttttttttttttttagacagggtctctctctgtcgcccaggctggagtgcagtggcgcgatcccggctcactgcagcagcctcaacttccagagctcaagggatcctcccaccccaacctcccgagtagctgagactacacgaatgtaccaccactcccggctaagttttgtgtttctcgtagaaacgtggtttcgccatgttgccgaggctgttctcaaactcctgacctcaggtaatctgccagcctcggcctcccaaagtactaggattacaagcagaaccaccgcgtctcttgttttcttttttgtttttgtttttgttttgttgttgttgttgatgttgttacagagtttcgctcttgtcgcccaggctgggatgcaatggtgtgatctcggctcattgcagcctccgcctcccggcttcaagcaattctcctgcctcagccttgtgagtagctgggattgcaggagccggccaccatgcccggctaattttttgtatttttagtatagacggggtttcaccatcttggccaggctggtctctaactcccgacctcagatgatccacccgcctcagcctcccaaagtgctgagattacaagcgtgagccaccacgtccagcctgactgcttttacttatatcactttttttgttgtggtaaaatataacaaaatttgccattttaaccatttttagtgtacaattcagtggcattctgtatactcacattgttgtgcaaccagcaccactatgggtctccggaactcttttatcttaccaaactgaaactttgtgtctatgaaacaataagtcgggattcccttctctcctagtccctgggaaccaccatttctactttctgactatgaatttgactattcctggttcctcatgtcagtggaatcatacagtatttgtctggcttatttcacgtagcataatgtcctcaaggtttctccatgttgtagcatgagtccaaatttcactcatttttaagactgaaaaatatttcgtcgtgtgcatacaccacctcgtttttatccattcatctgtcaatggacttaggttgtttccaccttttggctattgtgaagaatgtcggttaacattggtatacaaatacctgtttgagcccctgctttccatttttgggagttgccatc

SEQ ID NO: 651 - DNA, 48404 bp, Homo sapiens
  source 1..48404: mol_type = genomic DNA
aaaataagaaaaataaaaatacagtccttgggtgaggagattctttcctcagagaaagaaagtgctggttgggcgcggtggctcacgcctgtaatcccagcactttgggaggccgaggtgggtggatcacctgaggtcatgagttcgagaccagcctcaacatggagaaaccctgtctctactaaaaatacaaaattagctgggcgtggtggcgcatgcctataatcccagctactcgggaagctgaggcaggagaattgcttgaacctgggaggcggaggttgcagtgagccgagatcgtgccattgcactccagcctgggcaacaagagcgaaacactgtctcaaaaaaaaaaaaaaaaaaagagaaagaaagtgctttcctggccaatatagtttattatcaagcataggataaattggagaaaggcaggtttgtgacaaaactgatcagaggccgtttgcatagtgccaggtgttaaacatctattaactaatttcatgacactgtcttgtcacttctcacttttggtctgtgttttttaatattccaagaaaagttattagactagatgatctctaagatcacttcccattctatcattttattgtctggttcttacctaataccaatataatgtgtgtttgagatggtgaaggttcaggagttattggccacatttcacagatgggaaacagggcagcggggcacggggtttgcttcagatccgtgggtccttgctgagctctacttcattaagcgatcaatatttcctggctcctgagtggaactgcagttacatttccctttggaaaagctggtctgtttttaccaataggcctgcagaaaaaaaccaaggccggccaggcgcggtggctcatgcctgtaatcctagcactctgggaggccgaggcagggggatgacctgaggtcaggagttcgaggccagctgtcaacatggtgaaaccccgtctctactaaaaatacaaaaattagctgggcgtggtggcacatgcctgtaatcccagctactcagggggctcatgcaggagattcgcttgaacctgggatgcggaggttgcaatgagctgagatcttgccattgcattccagcctgggcaacagagcaagactctgtctcaaaaagaaaaaaagaaaaaaatcagggtcagagtattgttatgaaaaaacacaacaacaccacttattctactcccacagcctacctaggctttgaagcccacagtattgagagtaagaaaactcagaggtgctaggactgccaggaggcatgtaggaaagaggctagaggagaagaggaatagatttgaagccactaaggagaaatttcagtgatctgtggactaggatggcggagggggtggggacctgatcccaatggcacaatgacaaggtcagcctcatctcttctctctgttcttggcaacagccagtctagccagaaagagcaatctgtcaaatctaattaaagtagaagaaagtgaacaatgggcgcccagctctaaaatgacagcctggttcaatggggtggaggagctagggagggatgagtgctttgtgtgcttggaattagatccttcaaatggatcctttctgaatgcaaaactgtacatctctaactggattcttatttacttcaccaggactcttcagctccctgcgccttttaacacatgcacatccagcaaaagcagaggagaacctggctgtgattcaaaggtaaggctgtaatagtaatgtaatgtaaatagcttcatcatgcacggcttggacatggtactgtgtgcatgcaactgatatttgtgaatttgctcctatttattgtttcatgtttaattatattggtggcattagtgtttatcttattatttctgcaatcctttttattataaggcttattattggaatattgaaatttcagagcagtctgaagttttattaggaccacaaatagacatattttcagatgcaaaacacattaattatatttttgtcttatactttaaatggcctccctgatttgaatattttagtttctgaatcaaaagtgggttgcacagggaagaggcatattttataaatggaatcaaatgagcatatcccttaaaatacatgcatgaatacaggctattgaagcctaaaaaccatgcatctgcagaatctaaagtctcaaattacaagaggcctgttatcagcaaatattatactaaagaatgatttattaattttactctactttagtgtgggatactcagacatcttaaaggtgtgaggaaaaacaattctgtgaagtgggagggagagaatgggaagagagtaggcgctaacacaatctgcaatttacaagtctctgttccccaggtttggatggcttttcctatgcgttatctcatttaatcctcagggcaccctgtgaagtgtgttactatcctctccactctgcagataaggaaactaaggctttgagaaaccagcccaaggttacagagaaaggcagtcgggccttgaacccaggtggtctgcttccaagtctattgaacttctcaggaatatatttctggtagacacaggagacattaaatttagaaaatcattaaagtattaataatgtcaacatgaggacactcctctaatctattggtcttccctggacatgaaggaggcggtggattttagcttggtgtatttgtatcactttccccactttactgcatgttgcgaacctttatcttttttgcgtgcgtgtgacagagtctcaccctgtcgcccaggctggagtgcagtggcataatctcggctcactgcaacctctgcctcctgggttcaagcaattctttgcctcagcctcccgaataactaggattacagctgtgcaccaccatgcccagctaatttttgtatttttagtagagacagggtttcaccatcttggccaggctgatcttgaactcctgacctcaggtgatccgcccgccttggcctcccaaagtgctggcattacaggcgtgagccaccacacccagtctattttttaacagcatcacttgtttcttttctgtcctttctttctttacataccccttatacgaataaattatcttgtaaaaagacaaaggaaaagtctgccggtactgctcacttcaccccaaacccagtcctctccccaaagaaacccctgttaacaatttgggggtgtaaccaactatttcttacctgtttgcatagaggtgtgtgtgtgtgtgtgtgtgtgcacatcacattgttttgtgtgactttttaagagataaatggtgccatgttgtgctttttattcttaacttgctttttttttctttttaaatttatttcattattttattttttgagatggagtcttgctctgtcgcccaggctgcaatggcacagtataggcttactacaacctctgcctcctgggttcaagcgattctcctgcctcagcctccctagtagctgggactataggcgtgtaccaccatacctggctaatttttgtatttttaatagagacaaggtttcaccatgttggccaggcaggtctcaaactcctgacttcgtgatctgcttgccttggcctcccaaagtgccgggattacaggcataagtcaacatcctggccttttttttttttttcttttttagaacagtctatgccttgtggagatctttacctggcagtatgcttaaatctaattcattctatttaactcttacatagcattccatgcataatgacttgtactgttttctcttgacctcatctgtgcttttgaaatggtttaatggcatacaagtcaacatttaaccatatttgtatttatggggcagggagagacaggtgcaagctttctggctggctggagtgttactaaaaacataggagaagaaggaaaggtgagacacgcccacgccagtactgtgagcccaagtgagaggcctggggcaggtacagtgttatcagtagattcgttccctctctgcctctgaatatttgagcatttacctttttcttgagcccagctgttctccagacatttattccttatatatgagataacaataacatcctccacagggtgccatggggattaaactagaaaatgcacaggagaagacatcaagcccaggcatactgcgacatgttccgttatgaattgtgcctgtgctgacccttttccctctccctctcaaatcatgtattgctttttaaattttatttgagctcgtttgctctgaaggactatccctctcacttcagatattaggttgcaaggctcaaagcagggtggttaataaatggagctatggaggtcatcatgagatgttctggtgcaggattttgcctgaaagcattggaaactgactgagagctggactcaagtcctgatgtggacacttactagcggtgtgacttgggtaatgttttgtcatctggaaaataagcgtaatcctaatagtaatacttaagtctgtggggtgtggtcagatataaatgagataatgtatgaaaagaacttagtatcgtttctggtatacaggaaggtcagctgctgtcattgttatttagaaaggttgcaccatctccacttctgttttctggctataaagtatcactgtctagcttcctcagaagtgacaataaaaacaggcttaatctcagagcacagctgtttgttgttccattagtccatcattattttttaattgttgttttttatagtcagggtctcattctattgcccaggctgtagtgcaatggtgcaattatagctcactacagccttaaactcctgggctcaagtgatcctcctgtctcaccctcccaaggagttgggactaactacgggcatgcaccaccactcccagctctaatttttaaaaaatttttgtagatataggatcttgtgttgcccagactggtctcatactcctgggctcaagcaatcctcccacctcagcctcccaaagtgctgggattacaggtgtgagccagcactaatttcttttttaagtattccgagtgaccactgcatgtgtaataccttgctgggcactgtgcgaaatataaaggaagtgcgaaacagggctcttgccctcaaagtgcttacaacttttaaatttaatctccttaacactggagagaacacggcgtagtattgtgaacgtatgtgccatggctatttttctttaaacttctgctacttaaaaaaaatagatgatagatagatagatagacagacagacagacagacagatagatagatagatagatggagtctcgctatgttgactaggctggtctcgaactcctggcctcaattgatcctcccatctcagcctcctgaagggctaggattacaggcatgcaccactgcgcctggccttctgttactttcagaggcatccataattcttggacacctgctcatatgttctgtgtctagcttcagaattattgtagaagcttgcctgaacgtcacctatagaacctgagccattagatcatctatccctaaacgctaatgctgggctgatttcctggctgggggtggctctcatttcctccagagggcctgacagaaggaggacaagagctgattgggaggagctgccctcagggccacccaacgcttgctttcacagtaacctgcagatagtcccttgttctggacacaacaggagtggatatttagcaagcagatgaaatccaaagagcagaaactgtctgaaagggcctgaggatgctgtgtgaagggaatgaagcaacctcatttttgcggataaattccccggaaataaacctatagtatttacaaaatgtccaccttgtccttctcagcacagtaagctttctctgacccacagaacccattttctgtttggatatgaactcattgcagcctgcccaacatgaaattccaactggacataaaagggcacttcagctgtcaagccacgtgtggatttcggtttaagaatcagcccaggcagcagatgctccaagtgcttggggagtggcacgcctattcctgatacagaagtcaggcaccctttgtcttgatcccccacttaaatcagggataggcaattctgaatttttaaaaaggcgctatgttaaatccttcttatgagaaaaaaatatcacttataatgtagaaagttgaggtttctcagagagctctcccttttactgctgaaggggcttctcagcaggcaaagatatctgctcagtaacttatacttctgtgaagaagagattcctaagtgtaagatgtatgacttgtcgttttggggttaagtacaatcccaaacactctgtctccaccaccttttttctggaggtgttctttttattttattttttcaaagtggggcacatttcagaaatttttgctgggaaactcagaatacaaacttaacggcatgttaaaattctaaaaatagtttgaccctgcatttcacagagttcagggcttcaaaactgtgctgtccaaacatgattggtgattaattgattttgaccccctgcaagaagtgaaagcagctggtttacgagacttgagagacagccgattttccaagggagaacaaagaaaaagtggccacccctccccgctgggagcgcgctttgctttgtctgagcggactctctccagggactgccgccggggaggctcaaagctgtgtccttgcgattagtttggtacacttggttcagcagcctggggaatgtggggagatgtgtgcctgcacagtatcaacgttatcagctgccctgttcatgtcgcctctccctgaaggacactttcataacacagtaacacttaggagaaggttcccctcctttacttctgtttctctgctgataaacaaatgtcaggcatcttcctggatccgggccctgattcactaagttactgtatatccattgcccttttttgtcctccaaacactgagctctcagtgctcttctggctggatccagattgtgaagattacagccccactggttcctttcaggacttgggggcccaacattccatctccagggcctcaaggagccttccattcctgatgggttcccaattaccgtgtttctggtgctaccagacaaaagagaaggccctgttttgacccagagccctatagctgtgccctgatgggagatgggaattttgatgtctgacaacctgatcaacagcgtgactcctagaccgagtgaaccgtggtccgtccacgagccttcatcactagaggaaaaacggagatgaatgattatgacgcttgaagcaacgaacctctgcaagtaggagggtccggaaggttattccggaatcactgggcaaggtgaagggcagggctgcgtaagcgaaagcgtctgctcagtgcagggcagcataaactctgcaacataaaaagagggaagctgagctctggcatcatcttgcgggttgcagttcccggcaacagggctggctccagagcagaagcgcaacccgtcatcttcctgcgggccgcagccataggtggagaaaggtggtaccacaaggctctcccactggatgacggtgacgcgcaataagcagatgattgcagaggctcctgtcaaatgggtgcagagaaaagggaagtggggagaggaggagggacctagaaatggcactgcaacgatcctggaataaaaacgaggggccacagtcagaaatgacaaacgcctccaccttgaaacgcaacccctagcccatttatccaatttgcctctgataactgcttttaatatgttgtaaatcccattaaagcaggagagaataaatgaaagcagtcccctaccaggttctaattttcattctcctttagcattgtcttaaataacaaggacaccctaaaaatcaagtccaccctgtttagctgtggcaagcgctaaaaaccgttaagttcgttgaaacactactctccaaaccagagtaggcttccaggtttctctgcagagcagaaaggaggctgtggttgtgtccatgactttgcttccttggttagtacggtgacgtgcagcgccagggcctgggcctgggctcgggctcccacccgcgtggcgccgcagtcctggcgagccccgagcgctctgtccccggtgaccagcaggcggcgctatctccaggccgcagccgccgccccgcccgccacgaaggccacttccgccgcggcccggcgagcgcgcccccgccacgccctgctgtttagaagcggcctttcttcacatatcgctgtccgcgaaagtttctgaactcttgtgacaattaatgctgtttgaaaacctccctcttgggtcttttggaagagtggacatcctaaaaaaaattttctttttggagacggagtattgcttttgttgcccaggctggagtgcactggcgcgatctcggctcactgcaacctccgcctcccagattcaagcgattctcctgcctcagactcccgagtatttgggattacaggcacccgccaccacgcccatctgatttttgtatttttagtagagacggggtttcaccatgttggtcaggctggtctcgaattcctgtcctcgtgatccgcccgcctcggcctcccaaagtgctgggattacaggcgtgagcgactgcgcccggccaaaaaaaaaaaaaaaattaatttgggattgcgtaatcaaaaagtcttttagacatctcaaatgcattgcaacttattcgaataaaaagggctcctgacacggacaaaaaggcagtataggttgaaaattagaatgcttaaaaaaaaaaaaaattccccttcctgttagttccagatttttctgcaagcttggaggacagctcgcgaaaattcagctggggcgccatctgctggacgcgccgcgccgctgcaaggccctttccggaaaggtgtcggggttgcaggtcagcgccccattttttgtccaggagagactcgctggcaccttggctggaccaggctgggcgcagtggctcacacctgtaatcccaacactttgggaggccgaggcaggtggatcacctgaggtcaggagtttgagaccagtctggccaacatggtgaaaccccgtctctactaaaaatacaaagagtagctgggcctggtggtgcgcgcctgtaattccagctactcgggaggctgaggcagaattgcttgaacctggcaggcgaaagttacagttcgcctgggaggcgaaagttgcactccagcctgggtgacagggtgagactcggtctcaaaaaaaaaaaaaaaaaaatcttacatagtttttaaaaaataaaaagagaccaggctgactctctgcaagaaagtggcctgtgttgaggagccctcgggcctcaatgagtcgtcatttgttacattgctggtctctgaggaaaacctgaggctcaactcatttaatttcctccaccggcccacgggcacagggctacaaactaaaactatgctttccatcagtgcacacagcgggtttcagggacagaaatcacaatgtgcttattctgaatgcttctgattttgctgaatgggaggagtttccaaggtgaagagggtgacagaaatgaaattaatctgggagtagggagatgttaaaatgtggccttgccacggtttgatataagatcatgaagccctgccaacattttccaaactcctcagtcagttctgattcagttgaagatttttctatttagaagacttcaggcccttttcacatgagggtctaaatgcattagcaaacacatttatacatatacttcagcatgagcctgcattccccggtattgcactttgttaaagtccataatcagaaaacgttgggagaactggtagaaagcagaatattagagcagattgcagttggcccacccacccggaaaaatatggtatgagggatagaaagcatttgtaatggaaacatgttatcaagcatagttctgacccggcaaaccttgatagttactttccaacaaaactgaatgttgtattcagagatgagcttatgatgattttcctgaaagagatgaagtagctttatcaacagtatagcctactgaagcctcactgattatgtagtccttggggtccatgtcatgtgacttccatataagtcatgtgtcatttaatgactgatactttctgagaaatgcatccttaggcaatttcatcactgtgcaaacatagagtgcacatacacaaacctaggtggtagtgtcttctacactcctaggctatataacacagcctattgctcctaggcttcaaaactatatagcatgtaactgtactgaatactgtaggcaattataacaccatgataagtattcctgtatctaaacatagctaaacagaaaaggaacagtatttgatacagtccggattatgatattataatcttacggaaccaccatcattaatgaggtccaccattgactgaaacatcattatgcaaagcatgactgtatagtcaatatgttataaggacatcctttggtacttcaataactaagccctcgtgaatgagacctgctgattctaccatgatactgatcatagagaaaatgttaactttctatatgggtgcttgaagaagatactcagacaactaacaaaacgagatgagaaataagataaaaatccgggccaggcatcgtggctcacacctgtagtcccaacactttgggaggctgaggcaggtggatcatctgaggccaggagttcaagaccagcctgaccaacatggagaaaccccatctctactaaaaatacaaaattagccgggagtggtggcgcgtacctgtaatcccagctactcgggaggctgaggcaggagaattgcttgaacctgggagcggaggttgcggtgagccgagatcgtgccattgccctccagcctgggcaatgagtgaaactccgtctcaaaaaaaaaaggaaaaaagaaaaataagataaaaatctaccctgggctggatgtggtggctcacacctgtaatcccaacactttgggaggctgaggcaggaggatcacttgagcccaggagttcaagaccagcctgggcaacacagtgagacccctgtctctattaaaagttttcaaaattagccacatgtggtggcatgtgcctgcagtcccagctacttgggaggccaaggtaagagtatcccttgagcctaggagttcgagggtgcagtgagtatgatcgcgccactgcactctggcctgggtgacagagaccctgtcaaaaaaaaaaaagagagagagagaaagaggggtggggaggcagggaggaaggaaaggaaaaaggaaagggaatggaggggaagggaagaaaccaggtgcagtggctcacacctgtaatcccggcactttgggaggctgaagcaggtggattacttgaggtcacgagtttgagactagcctggccaactttgggaaaactcgtctctactaaaaatcctaaaattagctgggcatggtggtgggcgcctgtaatcccagctactcaggaggctgaggcaggagaatagcttgaacctgggaggcagaggttgcagtgagccaagattgttccactgcactccagcctgggtgacaagagcgagattccgcctcaaaaaaaaaaaaaaagttcactccggcaatgcatgagtgaactgtatcagaaaactagtaagacgaagttattgggtatcgaactgtgactagaataggaaatactgatggctagtgccacatctattgtatcccacaattctgctaatgtgaaaatatataagaaaaaactaatttagtttctcctgtgctgtcactcaacaatcaacacagaatacttctgtgacctctggtcaccaaaatttgtgtggggatttttccccaccaacaatcaatcagttcttttctgcaatggatagtagctgggtgttctctaattcaattctcacactacctggagagcctcggatcccacgaggactgagtcccatgagactgagccccgcttaggatgctgattgcgagccccaggtggtttttactggctataaatgagggttcccacaacctcctccttgggatcaattaatttgctagaatggctcacacaactcaaggaagcacttatttttgtttaccggtttattacaaaagatattcattttaaaatttttttgcttatttttatatttaaaaaatttgtttacagacaaggtctcactgtgttacccaggctaattttgaactcctgggctcaagcatgagccaccacacctggctacaaaggatattttcaaggatgcaaataaacaaccagatagagagatgcatagggcgaggtacggaggaaggggcaccaagcgtccacgccgtccctgggcacaccactctccaggaacctctacgtgttcagccatccagaagctctctgaaccctgcccttttgggtttttactgaggcttcattacataggaatgattgattaaaccattggccatttgatggtcagcttaaccttcagcccctctcccctccctggaagttccagccctctgggaatgtggctggttcccctggcaaccggatccccatccactgtagccatcctgattttcgcctcattaatgtaaactcaggtgtcttgaagagtttggtaaaaataacaaaagattgtctgtcttccacctttattactcaagcttttcctgagctgcttcaagactcaggacaaaaggcctttaacaaaagatattgctctagtcacttaggaaatgacaaggcttacaggagctgagagccaggaatagtggaggaaaaccaaaatatatacatcataacgtcacataatgtattaatatttgtagagttggccgcgtggggtggctcatacctataatcccagcactttgggaggccgaagcgggcggatcacctgaggtcagcagtttgagaccagcctggccaacatggtgaaaccccatctctactaaaaatacaaaaattagccaggtgtggtggcatgtgcctgtagtcccagctactcaggaggctgaggcaagagaattacttgaacccatgaggtggaggtcgcagcgaactgagatttcaccactgcactccatcctgggcgacagagtaagactctgtctcaaaaagaaaaaaaaaaaaaagaaataaattgcgtgaagctgggtgcagctgcgtactcctgtagtcccagctactcgggaggctgagtcgggaggatcgtgtgagcccaggagttgggagtccagccctggcaacagagagatggtatttctaaataaataaatagcttgataacaaatcagcactgaatattggcattaagtagagagtctagcatctctcagcaaaggttttttcagggcctctggcttgggacaggaccaggacgggaggtagagcagtgggatattccacttgtgtggcacaagtcagtcccttgaaactgttttctcttgttgttctgcttatttcagttgcttgtttgctaggagggtgcctccaccctcagagcacagacacacacacacacacacacacacacacacacacacacacaccctgcctttttcctcacagacatcccaagagcattctctgagcattatttttggggacgccaatataaaaaggctgcccactcccctggcagttgaactcaggattcaaatatttatgtttggcaaaaagcaaggggaaaacttttctggagatgacctctcccttgactttcagcttgttctataattgggcttttgagaatatgtgaccattctctgaaaaaaaaaaaaaaaaaaagaaagaaacactaaattcagtagtttctatctggaccctagagttaagtgtgtccctcacattgaaatcctgattccacagaggaactgccttaaaaatatcaattcaactcatttttgtgttttcagtatagatcagtcctcttctctcctctccccacaaaatatcaggcttatcagagggtcttggctttctggccacttcctggacccccacagggtgcccctgctgtgagttggcagcacctccaagttccccattgtggctcttttatctacttatttatttttgggacagggtctctctctgtcacccatgctcgagtgcagtggtgcgaacactgctcagtgcaacttcgacctcccgggctcaagtggtccttctgcctcagccttccgagtagctggcactacaggcgtgcaccaccacactggactaattttttttattattatttttttgtagagatggactctcactacattgtccaggctgttcttgaactcctgggttcaagcggttctcccacctcagcctcacaaagtgttgggattacaggcattagccactgcccccagcccatcatagctctttttttctttttgagatggagtctcactctgtcacccaggctggagggcagtggcgagatctcagcttactgtaatctctgcctcctgggttcaagcgattctcccgcctcagcctcccaagtagctaggactataggagtgcaccaccacggccagcaaatttttgtatttttagtcgagacagggtttcaccatgttggccaggctggtcttgaactcctgacctcaggtgaaccgcccgcctcggcctcccaaagtgctaggattacaggcttgagccaccatgcctggtcccatcttagctcttataataccatatataatatgatttatctgtgtcttccataccagacacttaaattttatgagaatggggccaagattatcatgttcattttgcacccccagtgcctaactagtgcctcagaccaggcaaatgttaggtaggattcaacactgagatgggagggaaaggtgtttccattggaggaactggcaggaccacatacaaaggtatagacctggaagagtgacaaggagcatgaatgtggtttgcttcagcctgaagggactgacaggaggtaagatggggtgattatgatgtgagtgtgagtttaaggcagtggtcatcagaacttgaaatagttacaattcatgcaatttctggtgtatgataaatgctttacacatattttcctcccctccctccctccctccctgccttccttcctcccttcctttcttccttccttccttccttttttgagagtctcgctctgcccccaggctggagtgcaatggcgcgatctcagctcactgcaacctctgcctcccggattcaagcaattctcctgcctcagcctcccaagtagctgggactacaggcgcacgccgacacgcccggctaattttttgtattttagtagagattgggttttactatgttgcccaggctggtcacgaactcctgagcttgggcaatccgctcacctcagcctcccaaagtgctaggattacaggtgtgagccactgtgcccagcctttatacatattttcatcaaaacttagagccttctttctttctttttttttttttttgagacagaatttcattcttgttgcccaggctggagtgcagtggcgtgatctcagcccactgcagcctccgcctcctggattcaagtgattctcctgcctcagcctcccgagtaactgggattacaggtgcccgccaccacacctggctaattttttgtatttttggtagagatggggtttcaccatgttggccaggctggttttgtactcctggcctcaagcaattcacctgtcttggcctcccaaagttctgggattacaggtgtgagccactgcacccggccaaaagtttacagccttcttagacaaggtggcatgaggaaaaaaatgtggtttggagccacagatctagctccttccatttgtagaaaatattacttaactagcaaaaccagtccccatggccaaaccaatcagtcaaatggagttattttgtttttttgttttgtgttgtgtgtgtttttgttttgttttgtgttgagatggggtcttgctctgtcactcaggctggagtgcagtggcacaatcctagctcactgcagcctcaaatccccaggttcaagcaatcctcccacctcagcctcccgagtagctgggactgaaggtgcacaccaccacacccagctaatttccagctaatttttttgttgttgttgttatttatacagacagggtctccctgtgttgcccaggctgttctcaaactcctagtctcaagcaatcctcctgcctcggcctcccaaagtgctgggaatacaggtatgagctaccgcgcctggctcatctgtgacttctaattctgttgttgttgttttgagacagggtcttactctgttgcccaagctgcagtgcaatggtgtgatctcagctcactgcaacctctgcctcccaggctcaagctgatcctcccaccttagtggcctgagtagctgggactacaggcgcatgcaccaccacacccagctaatttttgtatttttaatagagacagggtttttgacatgttgctcgggctggtctcgaacttctaggctcaagtaatctgcctgcctcagcctctggaagtgctgggattacaggtgtgaaccaccgtgcccggtcgtgacttccaattctaagaagcttgccgtgaatttgttaagatgaaataaggtgcaggctggttgcggtggctcatgcctgtaatcctagcactttgggaggacaaggtgggcggatcacctgaggtcaggagttcaagaccagcctggccaacatggagaaaaccccatctctactaaaaatacaaaaaatagctggtggcgcgcgcctggagtcccagctactagccaagctaaggcgggagaattggttgaatctgggagacagaggttgcagtgagccaagattgcaccactgccctacagcctgggtgacagtgtgagactccatctccagaaaaaaaaagaaatcaggtgctaccctgtgagtgcttcttacttggctctcaggagctcctccgtcagtcatgatgcttctccaattatccctttgcttgggaacatcgcacatagcatagttcaggatggctaagggatagctttttgtttttgatttttattattttatctatttatttattttgagacagagtcttgctctatcgcccaggctggagtgcagtggtgcaatcatggttcactacagcctcaatctttttgctgtgaaggctaagaggacttgggaaggggaggctggaaaagaaaaatcagctcattgcaaaccattctcaggcagttccctttaaggaaagggtacatttggtggtttagaacctggaaattgagacttgtaatactatctcattaaaagaaaaactttaggccaggcatggtggctcgtgcctataatcccagtgctttgggagaccaaggtgggaggatctcttgctgtcaggatgtcaagaccagtctgggccacacagcgagatcccgtatctacaaataatttaaaaattacctgggtgtggtggcgggcacctgtaatcccagctactcgggaggctgaggcacgataatcacttgaacccaggaggtggaggttgcagtgagccgagattgtgccactgcactccagccttggtgacagagtgagactctgtctcaaaaaaaaaaaaaaaagaaaaaaaaatctgctttaaaacatgtattgcctgcagaaacagctgaattttcagcaaggccctaaatggggctctaaatggcctcaccactcaccacagtattttcattttcaaattccacacattgtttggtcatgtttctccttctccatcttttaccacaaaatggatgtttcccttctgatttgggagactatgtcttcttagaagaaacatctaaaaatgggaaagcttgtgattaagaagaatttacatctatagtcgtggtcttttgaagatatctacggtatcttcaaaatgttcaaatgtccagggaagaaggaagttaagggaagtaatttgagtagcttccctatttttagaaattctattatgaccaaattttcccagagaggtatttttttttttcttttgagatggagtttcattcttgttgcccaggctggagttcaatggcatgatcccagagaggggattctttagagttcacaaagtacatcataataaggcataataataccttatagttgtgtctaatggatataatatcaaagagttttcatgatcttatccctgcattcccaccagtcatgtctccactgtgtgtaaggatggaaaatgagattgaaggccatcccagactcacagtctgaacaggagctcagacctcctgacaaatactatgttgggaaaggactctgaagcatcctcccagatgcttgctcagaccacaccttccttataataactttataataacaccccaggtattattttagctatttaacagaaaaaaaacaagacttggagaagataaatatactcatcaagtacacagtgactaagtggcagagctataattcagcccaggcctgtcttactcagagcctgttttagtgcctgggaagtaaatgataatttttgataagacagtttcagtacagtggtcaagacagaacacaaattacaaggggtttattcacttattcatcacttgtttattgaggagggtgaaacgtccagctatggcagtgtgaagaggtgggcaaattctttccctaaaaaaaattacaaaggtggaaaaaattgacaaaaatgaccatttctggcactctgaaaattgaccaaaggcatgtaataatctgagaaacagccaggcacggtggctcacacctgtaatcccagcactttgggaggccaaggtgggaggatcacttgaggccaggagtctgagaccagcctgggcaacatagtgagactcccatcttcacaaaaaataaaaataaaaaaattaaccaggtagtggtggcacatgcctgtagtcacagctactcaggaggctgaggtagaaggattacttgaggctaggaatttgaagctgaattgagctctgatcactgcaccccaacctggatgaaaaaaacctgagaagcgtttatgtttgagtaactgctgaacttttgtaataacagtgggaatctgtggcatcttgcctggggacactcccattctcagctgtcccttcagctccgtcagcaagaggattttgccagggtggggactgctgtaacaaccagccttgcaactatactcaaagtgggcctactttgtttggagcagggcaggaccaaaggttctaacctgaggttacagttctggctggggcaagcatcttcctgtctaaacttctacacatttacagcagataacagagggcctaagattgccacatacttcttcttttttttcttttctgagatggaatctcactctgttgcccaggctggagtgcagtggcacgatctcggctacctgcaacctcagcgtcccaagttcaagcaattctcctgcctcagcctcccaagtagctgggactacaggcatgcgccaccacgcccacctaatttttgtattttttagtagagaccgggtttcaccatgttagccaggctggtctcaaattcctgatctcaagtgatctgcccgcctcagcctcccaaagtgataagattacaggcgtgagccactgcatctggcctaattgccacatacttctgcctgcctcagcctcccaaagtgataagattacaggcgtgagccactgcatctggcctaattgccacatacttctgcctgaccctggggcagcctgcctagagaaaatgtgatggaagaacccaacagagaataaaagtaaaagcccagatagaattgaaaatggcctgaacttggccgggcgcggtggctcacgcctgtaatcccagcactttgggaggccgaggcgggcggatcacgaggtcaggagatccagatcatcctggctaacacggtgaaaccccgtctctactaaaaatacaattagccgggtgtggtggcgggcgcctatagtcccagctacttgggaggctgaggcaggagaatggcatgaacccgggaggcggagcttgcagtgagcggagatcgcaccactgcactctagcctgggcgaagagcccgtctcaaaaaaaaaagagaaaatggcctgaactttgaattgtgtgcttcctaaaacatgcagaaatgcattatcagaagacagaaggccaactggcttatggcatttcaggacaatttctgccccatcattggtcaaccaggaggctactcagacacagggggcaacccctaggaagccagacttaaaaagtaaaacaaggccgggcacagtggctcacagtgacccagcactttgggaggccgaggtgggtggatcatctgaggtcaggagctcgagaccagcctgaccaatatggtgaaactccatctctactaaaaatacaaaaattagccaggcttggtggcaggtacctgtaatctcagctacttgggaggctgacacaggagaattgcatgaacccaggagatggaggttacagtgaactgcgatcatgtcactgcactccaccctaggcgatagagcaagactccatctcaaaaaaaaaaaagaaagaaaaaaaaagtaaaacaagagaaaagaaactaagcagagagatcagcagctacaaacctcagaggggagacagagctcatagatttagcccaggcaagtcactaaacaaagacaaacccgccggacttggtggctcatgcctgtaatcccagcactttgggaggctgaggtgggtggatcacctgaggtcaggagttcaagaccagcctgaccaatatggtgaaaccccatttctactgaaaatacaaaaattagctgaacatggtggcatgcacctgtaatcccagctactcaggaggctgattgcttctcagccttttggctaagatcagatgtactcaggaggctgacacaggagagttgcttgaacctgggaggcggaggttgcagtgagccgagattgcaccactgcactctagcctgggcaacagagcgagactctgtctcaaaacaaacaaacaagacaaacccacaaacaaagcaaaaaacaggctttagaaagtaaaatcggctgggcatggtggcttacgcctgtaatcccagcactttgggaggccaaggcaggcggatcacgaggttaggagttcaagaccagcttggccagcatggtgaaaccccgtctctactaaaaatacaaaaaaattagccaggcatggtggcatgcacctgtaatcccagctactcaggaggctgaagtaggagaattgcttgaccgcaggaggcagaagttgcagtgagccgagatcctgacactacactccagcctgggcgatagaacgagattccgtctcaaaaaaaaaaaaaaaagagagaaagaaagaaagaaaagtaaaatcagagccaggtgcggtggctcacacctgtaatcccagcagtttgggaggctgaggcaggcagatcacgaggtcaggagatcgagaccatcctggccaacatggtgaaaccccatctctactaaagtacaaaaaattagccaggcgtggtggcacacgcctgtagtcccagctacccaggaggctgaggcaggagaactgcttgaacctgggaggcggaggttgcagtgagccaagatagagccactacactccagcctggtgacagagcaagactccgtctcaaaagtaaaaaaaaagaaaaagaaagtggctcacacccataagcccagcactttgggagactgaggctggtggatcacctgaggtcaggagttcaaaaccagcctggccaacaaggtgaaacccgtctctacaaaaaatacaaaaattagctgggcgcggtggcggcgcctatagtcccagctactcaggaggctgaggcaggagaatcacttgaacctgggaggcggagattacagtgagctgagaccgggttgttgcctgggcaacaacagcgaaactctgtctcagaaaaaaaaaaaaagaaaagggccgggcacggtggcccacgtctgtaatctcagcactttgggaggccgaggcgggcggatcacgaggtcaggagatcgagaccatcctggctaacacagtgaaactccgtctctactaaaaattcaaaaaaaataattagccgggcgtggtggcaggcgcctgtagtcccagctactcgggaggctgaggcaggagaatggcgtgaacccgggaggcggagcttgcagtgagccaagatcgcgccactgcactccagcctgggtgacagagcgagactccctctcaaaaaaaaaaaaaaaaaaaaaagttagaaatcaacaacagaaagagatctgggaaatccctatgtatttggaaataaaacagacttctaaatagcacataggtcaaaagccacttcacaagggaaatcttaaaatattttgaactgagtaaaaatgaaaatacaacatatcaaaatttatgggaagcagctagaagtgcttagaggaaaacatatatataagaagaaaagaaaggtctcaaatcaaattaagcttctatcttaagaaaataaaaagaaggccgggcgcggtggctcatgcctgtaatcccagcactttgggaggccgagtcgggctgatcccctgaggtcgggagtttgagaccagcctgaccaacatagacaaaccccgtctccactaaaaatacaaaattagccgggtgtggtggcgcatgcctgtaatcccaggtactcgggaggtggaggcaggagaatcacttgaacccgggaggcggaggttgtggtgagctgagatggcgccactgcactccagcctggtcgacaagagtgaaactccgtctctaaataaataaataaataaacaaaagatcaaactaaacccaaggtaagcaaaaaagaggaaataaagattagagcagaaatcaatgaaacagaaaacagcaatatagaaaatcaacgaacaaaaagttgtttctttgaaaaaataacaatgactggtcgtggtggctcacacctataatcctagcactttgggaagcagaggcaggtggatcacttgagcccaggagttggagaccagcctaggtaacatggtgaacaccgtctcttccaaataaatacaaaaattagccagtcatggtggcacgtgcctgtagtcccagttactcgggtggggatgctcatgagatagaattgcttgagcctgagaggttgaggctgcagtgagctgaggtcacgccactgcactcaagcaggcaatagagcaaaacattgtctccaataataataataataataagattagccaagcgaaaaaaatttttaaaaaggccagacatggtggcttatgcctgtaattccaacactttgggaggccgaggcaggtggatcacttgaggtcaggagtttgagaccagcctggcccaacgtggtgaaaccccatctctactaaaaatacaaaaattagccaggtgtggtggcgggtgcctgtaatcccagttactcaggaggctgaggcaggagaatcgcttgaacctgggaggtggaaggttgcagtgagctgagatcgtgccactgcactgcaacctgggcgacagagtgagactccatctcaaaaaataataataataaatttgttttaaaaaagagaagacactggctgggcgtggtggcttgcgcctgtaatcccagcactttgggaggcccaggcaggcggatcacgaggtcaggaaatcgagaccatcctggctaacacgatgaaaccccgtctctactaaaaatacaaaaaattagtcgggcatggtggcgggcacctgtagtcccagctacttgggaggctgagtcaggagaatagcgtgaacctgggaggcggagcttgcagtgagccgagatcgcgccactgcactctagcctgggtgacagagtgagactccgtctcaaaaaaaaaaaaaaaaaagagaagacacaaattaccagtatctagaatgaaagagaggacatcaatctctgccctacaaaaattaaaattataaaagtatattatggggccaggcatggtggctcatgactatgatcccaacactttgggaggctgaggtgggcagattacttgagcccaggagttccagaacagcctgggtaacagtgaaaccccatctctaccatacacacacaaaaagtataatgtgaacaactttataccagtacattaggcaatttaatgaaatgaaaaattcctagaaaggcataaagtatcaagaccaactcaagaagaaataggatatccaaacatacctatatcaagtggttaaaaaaaatgaatttaaaaaacaatcttccagctgggcatggtggctcacacctgtaatcccagcactttgggaggccaaggcaggtacatcacttgaggtcgggagttcaagaccagcctgggcattatggtgaaacccgtctcaaccaaaatgtacaaaaattacccaggtggggtggcacatacctatagacccagctacttgggaggctgaggtgggacaataacttgaaccagggaggtggaggtgtcagtgagctgagattgtaccactgcactccagcctggggcaacagagtgagaccctgtctcaagaacaaacaaaaacaatctaacaatcttcccacaagagcccagcccagatggcttcattggtaaattccattaaatatttaaagaaccaataatacaaatattgaacaaattatttcagaaattagaggaggaacacttcccaatttattctataaattcaatattactctgatactaaaaccaggtaaagacactgtaagaaaagtatatatcgatatccttataaatattgatacaaaagtcgtctgcaaaccaaattcagcaacatataagagagattataggctgggcctggtgactcaccttgtaatcctagcactttgggaggccgagatggatgggtcacttgaggtcagcagttcaagactagcctggctaacattgtgaaacccctgtctctactaaaaatgtaaaaatcagctgggtggtggcaggcacctttaatcacagctactttggaggctggggcaggagaatcgcttgagcccaagaggtggaggttgtagtgagctgagatggcaccactgcagtccagcttgggcgacagagcgagactcggtatttaaaaaaaaaaaaaaaaagattatacaacacgaccaagttgtatttattccaaggatgcatggttggtttaaattctaaaataaattaatgtaatatacaatattaataaaggacaaaagctacatgatcatctcaatcgatgcagaaaaaacatttgacaaaatccaacccattcatgataaaaactcaacgaactaggaatagaagggaatatccttaaccagataaggggcttctaagaaaaaccaacagcaaacattctgagtctgtcagctggtgaatgggtaaataaaatatgctacatccatacaatgcaatactgttcagcagtaagaaggaatgaaggatgaatgcatgctaccatatagattaaactccagaatatgatgctaggtggcagaaaccagatgcacaggttaggatgtttttgctctgtaaggcattaaccagttttgtatctatctataaattttattctaataaaattttaagtgtctttcctaataaaatatgtaaattcctgctcttcaagtgctcttttcaccagcttgaccattttactgcttcctttagttaataaaacttgatgtttattctatatttgtatgacagtcataatcttaactttttcaaaattatattttaacatggaagacatagcagtaggggcttgtggacattcttttctgactgcttctattttctcagtgaataagggtgaaaagtcatgaactgagagtgagaatagggagaagctttgggggaagttgagggcagtgaagaagatattacaaaaagacttttagagcctggccaacatggcgaaaccccatctctactaaaaatacaaaaattggctgggcacggtggctcacacctgtaatcccagcactttgggaggccgaggcgggtggatcacgaggtcaggagatcgagaccatcctcactaacatggtgaaaccccgtctctactgaaaaaatacaaaagattagccaggcatggtggcgggcgcctgtagtcccagctactcgggaggctgaggcaggagaatcacttgaacccgggaggcggaggttgcggtgagccgagatcatgccattgcactccagcctggggcaacaagagggagactccatcacaaaacagaaacaaaaacaaaaattagtcaagtgtggtaggcctctgtaatcccagccacttggggaggctgaggcaggagaattccttgaacccgggaggtggaggttgcagtgagccaagattgcagcaccactgcactccagcctgggtagcagagccagaccctatcttaaaaaaaaaaaaaaaaaaaaagactttcaggagagtgggaaagtgaaaaattaagggaaattccggatgactgctgagcaatataaacccgctggaggttagtagtcatgaactttaaatggaactctcggcataccacagccatgcctgcaggcatggagtaggcagagttagatttaatcaggttattcggttttgctaagtgagcacaaacaagaaaataaagcatgagagttggtaggtgtaagctacggtggaagctatggaaggagacctgaggatgtagcggaatagaggacagtgcacacgtgggcgtgtcaatgtcttgtaagtcccagttaggtagaagggttgtgggtactggtttcgtagagctaaaaagtgggaggttgtggttggacggtgggatgcttaaaattgaaatcatgaagggagggggcgtggggaggggatactcattttatttttgagagagggtttcactcttgcccaggctggagtgcagtggcaccaacatggctaacttgagctcttgggctcaagcgatcctcccacctcagcctccccagtagctgggactacaggcatgtaccaccacaccatgctaattttaaatttttttgtagggacagggtctcactatgtcgtccaagctggtcttgaattcctggactcaagcgatcttcctgcttctgcctcccaaagtggcctataattttatttgaacagtaactcaaactggtactgaaactagagttcagtcccaatttgtctaaacaaaagaaagtgaagggtcaagaaaaagggttaaattatgaagcaagatcccagagactgtgagcaggaatacagaactggggcacaggtggataggactagtattaataaaatcagggacggggagccctacagagatagaagacaggataaaagcaggaaggggagccgggtgcggtgacttacgcctgtaatcccagcagtttgggaggccgaggcaggcggatcacctgaggtcgggatttcgagaccagcctgaccaacacggagaaaccccgtctctactaaaaataccaaattagccgggcgtggtggcgcatgcctgtaatcccagctactcgggaggctgaggcaggagaatcgcttgaacccgggagctggaggttgcggtgagccaagatcatgccattgcactctagcctgggcaacaagagtgaaactccatctcaagaagagaaaagaaaaaattagccgagtgtcgtggtgcacgcctgtaatcccagctactcaggaggctgaggcagagaatcacttgaacttgggaagtggaagctgcatcattgaaccgagatcatgccactgcactccagcctgggcaacagagcgaggctccatctaaacaaaaaaaaaaaaaaaaaaaaaaaacgggaaatgaattgtcaaatgaggatatatatagggtgaggtatggaaggctcctgagtgcagcagcttctgtcctttgagtgtagtggagctggggtgcacaaccctcctgcaagtggatatgttcttgtttaccagtttggaactctgggaacccggtagtttagggatttttatggaggcttcatcacgtaggcatgatcagtttttaactcaatccctagtccttctcccctccctggaggatgggggatgtggctaaattttcaagcttctagtcatgactttgtctttctggtgaccagaccctatcctgaagctatccagcaagacaccaagagaccctcattagtacaaaagatgctcccatcacccaggaagttccaaggatttaggagctctgtgtcaggaacttggtgcagaggcaaaacacatatattttttttttattttttaagtagaaacggggtccctctgtgttgcccagggtggtctcaaactcctgagctcaagtgatcctaccacttcagcctcccaaattgctgggattacaggcttgagccactgcacctgacctcaggctgttttagagcaagtcttatcctcacaccaaatgcagatggagaaactcacccaaaatacaactacggaccttgccaaggttactctatttaatcacactataagccagaattcctagtaattataatggctctgagagtttacagtgaatagtctaattcagtattttgttattctaatctttactttccttactctgcagtgcttttccctttgtattttatcttgtccttgtctttaaaggtcaaaatgattctgttgcttgctaagaaaccaactaccactttccccagcagctgaacttatctttaaaaaatatatatatatatatatatatatatttctctgatagaggtcttgctatgttgctcaggctggtctcaaacctctggactcatgtgatccacccacttggtcttccaaagtgctggaattacagtcatgaaccactctacctggtagattcgtcttttctttttgtttttcgagactgagtctcattctatcacccatgctggagtgcagtggcgcaatctcagctcactgcaacctccacctcccaggttcaagcgattctccattcttgtgactcagcctctggagtagctgggattacaggcgtctgccaccacgcctggctaatttttatatttttattagagacagggtttcaccatgttggccaggctggtctggaactcctgacatcacgtgatccgccggcctcagtctcccaaagtgctgggattacaggcgtgagccaccacgcccagccagatttatctttttaggcttccatagcaatgtgcttgaggctagggcgtggtggctgacatctgtattcccagcatttggggaggctgaggccagtgggtgtggtggcacgtgcctgtagtcccagctacttgggaggcccaggtgggaggatcacctgagcctgggacgttgaggctgcagtgagctacagtggtgccactgcactccagcctgggtgagagagtgaaaccctgtctcaaaaacaaacaaacgaacaacactaaaagaaactagtgtgcttggggttaggccctcctggccttgaccaaaggccatgaaacccccaatgcaactgagcaagtgagcatcagcgaaacaggctgtgtagcttgtcaggtgatctctgttccaggataatttttttttcctctgaaacaactttggtttattatcagtcatttcgtgcagagtaaagagaaagaacagcgtgaatttaaaatttgtttctttgttttgaacaaaaattatttcttctttttcttttccacagtgtgtgaacccagctctgtcccttgggttccgtacatataaatggagcagctgagggaactggataagaagtcgattttgtagttacaggctgttccgtatcacccatttacaaggtcagtggggactgaaactgaccaaaacagagaactatgtactttaaaatgaggaaatctttatctatcagaaacacacaaagaactttcaggggttctaaagggcttatattcctgactccattggaacaaaatatgctggagggtaaggaaaaaggtatatggactagaggatcaaaaacagcaaagtgttgtaaaaacagaggcctgcaagtgcagaccctcatctgttagaaccctgttccagcctccttccttcactgaatctcctgaggggtttggggacattgcagattttgatgatttggggaaataaacatgtaattaaagttgtagatataaaagtggttctatattaatgttcttggagagaagacagtaatttaggccaggagcggtggttcacgcctgtaatcctaacactttgggaggctgaggcgggtggattacctgagatcaggagtttgagaccagcctggccaacatgatgaaaccccgtctctactaaaaatacaaaaattagctcggcatggtggtgggcgcctataatcccagctacttgggagtctgcggcaagagaatcacttgaacccagggggcagaggttgcagtgagtccagatcaagccactccatctcaaaaaaaaaaaaaaaaagaagacagtggtttagaaatgaaggccttaaagccaacctcctgagggaagggttgggattccaaagaaggctggactgaaggcaacatgcgctgctgtgtgacctcagggcagttcccaaagccaggcagcctccatttcctctcctgtaaaatggaggtaacaatagtgtctacctcataggattatcgtgaagaataaataagttaaagcatttaaaatcctcagtccagggatgaacacctagcatgcagatactggtactagcagtggaggggctgaggaatgggggcaggaagaggcatttattttttttttaattttacgtttgcaggccaggcgaggtggctcaagcttgtaattccagcactttgggaggccaaggtgggaggattacttgaggccaggagtttgagacagtctggacaacagcaagaccctctcgctacaaaaaatacaaaaaattagccaagcatggtggcgcacacggtaacctcagctattcaggaagctaaggcgagaggattgcttgagcccaggaagttgaggctgcagtgagtcgtgatcatgccagcgcaccccagcctgggtgacagagggagaccctgtttcaaaaaaaatgttgtacagctgtacaatgtgttttaagctgtgttattacaagagacaaaaagtttaaaaaaaaaaagtttacaatttttttttttttttgagcagagtctcactctactgcccaggctggagtgcagtggtacaatcttggctcactgcagcctccgccttccgggttccagtgatcctcctgcctcagcctcccaagtagctgagattacaggtatgtgccaccacatccggctaattttttctatgtttagtagaggtgaggtctcaccatgttggccaggctgattgtgaactcctgacctcaagtgatccgcccacctcagcctcccaaagtgctaggattacaggcatgagccacagcacctggccttacaaatttttaaagctacagtaagctaaagttaatttatcattgaagaaggaaacatgttttcaagtttaatgtagcctaagtgtcagtgtttataaagtctacagtagtatacaataatgtcctaggtcagctgggtgcagtggctcccacctgtaatcccagcactttgggaggcccaggagggagcatcacttgagcccaggagtttgtgagcagcctgggcaacagagtgagaccttgtttttataaaaattatttatgttttgttttttgtttttctttttgagacagtctcgctctattgcccaggctggagtgaactggtgtgatctgggctcactgcaacctccacctccctatttcaagcgattctcctgcttcagcctcccaagtagctgggattacaggtgtgcatcacaacgcctggctaatttttgtgtttttagtagagatggggtttcgccatgttggtcaggctgctctcgaacccctgacctcaggtgatcagcccgccttggcctcccaaagtgctaggattacaggcatgagctatcatgcccggctataagtaaataaataaataattcaaaaatgaaatttttttttttttgagacggagttttgctcttggtgcccaggctggagtgcaatggcacactctcggctcactgcaacctccaccttccaggttcaaacaattttcttgcctcagcctcccgagtagctgggattacaggcatgtgccaccacgcctggctaacttttttgtatttttagtagagacggggtttctccgtgttggtcaggctagtctcgaactcctgacctcaggtgatccacctgcctcggcctcccaaagtgctgggattacaggtgtgagccaccgcacccggccaaaaatgaaaaatttttttaaatgtcctaggccttcacattcacttaccactgactcactaagcaacttccagtcctgcaagttccattcatggtaagtgccctatataggtgtgccatcttttatcttttataccatatttttaccataagttttctatgtttagatacaaatactttcttttttttttttgagacggagtctcactgtgtcgcccaggctggaatgcagtgtgcgatctcggctcactgcaacctctgcctcccgggttcaagcgattcttgagcctcagcctcctgtgtagctggcacacactaccatgcctggctaatttttgtatttttaatagagttgggttttcaccatgtaggccaggctggtctcaaacgcctgacctcaagtgatctgcctgcctcaacctcccaaaatgctgggattataggcatgagccaccacgcccaacctagatacaaataccatctagttacaatcgcctaagtattcagtacagtaacaggctgcacaagtttctagctttggagcaataagctaggtttgcatatgtacactctgtgatgttcccacaatgaagaaattgcctaggatgcatttcttagaacagatcttggttgttaagtgacacatggctgtacatgagtaagaagagaccggtttcacctctaagtttcctaactataatttatgcactgatattctctctagtattcagattccatgctttaattatgtacgaaaaaacattacttagtgtacttgataatggctggctgtgtgtcctgggagcaggaggaggcaggtggagatgcagaaaagtaaaaaggaaaagattatcctgagattcacagtccctaagcaaattccccattgttttgcttggttgcaagaagttagtcgcagggaaagaaaaccttcaggggccttctactttgggctgcctgagtgctttttcagtacatgaataaatttattaaataaatgttactataaatagaaaagttttccaggctctatgatatagtccttttattagagtaatactgtagacaattgaagaatatgagtagttccttttacttttcctccaagagaattttatctgtgtatcctaaaggaatgggggaagggggcaagggaatggtagttaattccagaaaagattagcaagagcttgagtaagaagtcttgggtgtagggatacagggtgggaatacaggtcaaaggaaccggttcagttgtttcagttagtcaccgaggaagtgatgccacagcactgtatttttaggaaatataaagcagatcagaacaagccaaatctcagtggaaagaaaatgtgtaatttcagagatgaaagtcaatcttctatggtaatctcccagaatggagctagcatttcacatactaagccctgccaaaggggaagtcgtccaaaacacagctcaaatcagggaggaagagaacttctaaagaatttgtaggaacttttaaagactgcaaacatttgtgggataaaagagaaataaataaaagttaaaggatccaaggactgtttttcccataaaataaaataacatgttacctagaaagtaatgtcctgctattctgtacatacaaggcataaaaaaggagaaaaaacaaactgccttgaaatacataattttatttcttttgggtggaacagggtctgttttccccccaggctggagtgcagttgcatgatcttggcgtactgcagcctcagcctcccaggctcaagtgatcctcccactaaagccttccgagtagctggccgacaggcacacaccaccatgtccagctaattttttttttaattttcatagagacagggtttcgccatgttgccccaggctggtctcgaactcctggacttaagcaatctgcccaccctggcctcccaaagtgttgagattacagaaatgagccacctcacctggctgaaatgcataaatcttaaaaaatgcttattgtaggctgggcgcaggggctcatgcctgtaatcccagctctttgggaggccgaggcaggcagatcacctgaggtcaggagtttgagaccagcctggggctcagtggcgctgagccaagatagcgccattgcactccagcctgggcaacacagcgagacaccgtctcaaaaaaaaaaaaatgcttattgtaaagaaggttgttcaactgcagagtcctagctgtcctttggggttgttaaaagtagggtaaattttttttcttgttacattagtaaccttaccataggactacaaattcaataaatgacttttctaggacttccctttccctgttaactagagccaataacaggctgaggaagaacctagaataaaagagacaactgtcattgtaggtatttaatctgactcctatctcttgtggtttggggtaaattatttcaagtctcaggactttattttccacagttccataataaatacctttgtaaaaactcatttataaaaactctaccaaggcactattgcagtagaaaacattttgttataaatttctacataagcacaaaatattcctacatcattaattgtatcatgtaatttgtaactgaacacaaacaaatacttcagcattactagtatctcagcaaagaaaacaggagttaggctgaaaaaaaataaggttcagttttatctgaattcttttctctttactaatgttttgtgatgttttgtgaacatgctatatggtcatttaaagcccaagaaagctgcagtaggtatgcaacgcttatttccctaaagcattgtaagattacaacgaaagccccatctgtaattatttatctaatgttctggtgattcttcagtcaagatgttgactgaggaagcatgttttctcctttgctcatatttgtagagctcacatgaaccccacaaactttgagtcacacatcacagaatgttagggctgtaagggccttacagaggatcctgtccaatctcctcatattgcacattcaaaacctggaccctgaggaggggaaatgtccatccaaagttatatattagccaggcgtggtggctcacacctgtgattccagcactttgggaggccaaggcaggaggattgcttgagcctaggagttcaaaaccagcctgggaaatatagtgggacttcatctttacaaaaaaaaaaaaaagattagccaggcatggtagcacacacctgtagtcccaggtacttgggaggctgaggcaagaggattgcttgagcccaaaaagtcgaggctgcaccactgcactccatccagggtgacagagtgagaccctgtgtaaaaaaaaaaaaaaaaaaaaaaagttttatagcaaaaaaaaaaaaaaaggctgatcactgaaccgtgtcttctgtcaccctattaataatttagcatagtctgggcaaactggctcatgcctgtaatcgcagcattttgggaggctgagcctggtggatcacctgaggtcaggagtttgaaaccagtctgaccaacatggtgaaaccccatctctactaaaaatacaaaaattagctgggcatggtggcacatgcctgtaaccccagctacttgggaggctgagacaggagaattgcttgaacctgggaggtggaggttgcagtgagctgacatcatgccattgcactccagcctgggcaacagagcgagactccatgtcaaaataataataataatttagcatatttttggtgaattctggaaactgtcaactgaaaagtaagtccagtttctgcctctccttacactgtaatttttagactcataaagatctgttaacataaaggttaaatgtttaactgtctacccaggaaatttttccccaaaaaattccagcagagggcagcaaatctaaatatggatcccaatgcttaaaattaatttaaagtacaagagaattactcttttttttttttttttttttctgagacagagtctctgtcactcaggctggagtacagtggcacgatctctgctcactgcaacctccacctcccaggttcaagtaattctgcctcagcctcccgagtagttgggattacaggtgtgcaccaccatgctcgactaattttcacattttttggtagacatggggtttcaccgtgttagccaggctggtctcaaacttttgacctcaagtgatccgcccgcctcccaaagtgccagaattacagacttgagccactgcgccaggcctgttggttgtttttcttccctatcccactcccacttccctatcttccctattccctctccatgaggcagagccatcagttttgctcacaaacatattccctaagcatctcggatactgtgctaaatatatctggggaatgaatgaaaaagttgaaaagctctactaagactaaaatctctacacatatgttccacaagggccattttgtatgtgtgagttgaagtatatcttgaactcctgacctcaagtgacctgcctgcctcggcctcccaaagtgctggacttacaggcatgagccaccgtgcccggccagaaaattcacttttgttccctcaatatttccataaactctgtatctcccagagatggtcaaggaattcatgagctaagataacatgatagagttgcagagaaacaaaaacaacagaaataaaaggcgcttctgagaaaccttggcagagatggtcagagaggcacatttagtatgacgcagtacaagttagtgttgaagggtttaattcctcggagctctactttcctcatctgtaaactagggataataattcatagagtttgtcatatggatgaaatgtgatcatgtgatatgaaaagccaactactcggccaggcgcggtggctcacgcctgtattcccagcactttgggaggccgaggcgggcggatcacgaggtcaagagatcgagaccatcctagctaacactgtgaaaccccgtctctactaaaaatacaaaaatttagccaggtgtggtggcacgcgcctgtagtctcggctactcaggaggctgaggcaggagaatcgcttgaacccgggaggcagaggttgcagtgagctgagatcgcgccactgcactccagcctgggtgacagaacgagactccgtctcaaaaaaaaaaaaaaagccaactactctgcatagttagcaatcaaaaaatgtaagctattcattatcctaatgaactgaaaaaactgcttttgcgcctatcgggaggagactgttagaagccaaaggctcatttaaagaggacgtaaggaaaagcaaccaaaaaggtgggaatagagtttaaggcgcgttcgtggtgattcagacctagagtggggagcaagccctctctctggacagccctcagcggcgaggggagcgggcgcccgcgggcccagccggggtgcccggcagccaggactccgaggcggaacccgcagcctggtcccggcgtcggcgcctccccggcggcgtagggagcgcagccgcggggaccgggggcgaggccggggcggtgcagtaagggcttccctcctgggcgcggtcgccctcttacctggagcttcccctcgctggggttttgcccacctgacgcccccgcacccaccggggacggggcagacgtccggcctgctccctcctcccagtggacacctctgtccctgtcccggcccattctccagccccagagcccttcctgcccttcctccccttcctccccttcctccccttcctccccttcctccccttcctccccttcctccccttcctcctcttcctgctcctggctccttccgacgagtttggtttgaacttttgaatccgccaatcagcgccgcgcgcccccactccgcgggtgcggccgggcgcaggccagggctcgaaggtggggccgcagcggcacggggcggggtctggggcccgccctcccgacacgtggccggggaccgggtatataaggcccttcggggccggccaccctttcactacttctcccccggactccttggtagtctgttagtgggagatccttgttgccgtcccttcgcctccttcaccgccgcagaccccttcaagttctagtcatggtgagtggggttccctcggggctggggaagagtgcgcgtcccaggggacggcgggcccggaaactactgcctgcacctcgggccgcgcccaggacagctccagactaccccgggcccctccggttaacctggcttgtggcggccgggctggaaggtcgagttcacttggcagacaccagttcgggccggaaaacctggcccgggtgcggccatcagtggaaatggaaagccctcttgatcctagtgagggctttccccgcagggcccgctactgccctagggaggaaggtcagggagcctgctcattggcctccaagaacttaaactaaaaatccctccccacgttttctcaagcgacctctccttcctactgccttacaaactgggccccggaggccctcgtgcgctcccgcaccgacggtgcagcacttcctggctccccctctccagcgcccagtgactcgctgctgagtcacctgtggccctgccctggggagagcttccaactgcgccagtccacttgagaatggaggcaggcacctccttggaagggaataattaactttcacgttgcctaatcctgcatttctggtgttaatctagtggtaggtttatagctgaagctttctacttaagccgggtttaaaaacacgtccacaaaaggatattttcttataaaaccagagttggcccggcgcagtggctcacgcctgtaatcccagcacttgttcgagacaaacctggcgaacatggtgaaaccccgtctctactttaaaaaaaaaaaaaaacaaaaaaaaacgctgggcgtggtggcgcgcgccggtaatcccagctactcgggaggctgaggcaggaaaatcgcttgaacccaggaggcgtaggtttccctgagccgagatcgcgctactgcactccagtctggacgacagagcgaaactgtctcaaaaaaacgcaaacccggcccggcgcggtggctcacgcctgtaatcccagcactttgggaggctgaggctggtggatcacgagatcaggaaatcgagaccatcctggctaacacggtgaaaccccgtctctactaaaaaaaaaaaaaaaaaaattagctgggcgtggtggcaggcgcttgtagtctcagctactcgggaggctgaggcaggagaatggcgtgaacccgggaggcggagcttgcagtgagccgagatcgcgccactgcactccagcctgggcgacagagcaagactccgtccaaaaacaaaaaaaaacccgcaaaccccagagtaaactagtaccacgtgttcttagttcagttttcaagaaacgtgaaattatacgtaacttgagtgttttctataaagcttccagaagtattgaaaacaactatcttaggccgggcgcgatggcttatggttgtaatcccagcactttgggagtccgaggcgggaggaccgcttgagctcaggaggtcgagaccagcctgggcaacacggtgaaactccgtctatactaaaaatacaaaaattatctgggcgtcgtggtgcgtgcctgtagtcccagcttctcgggaggcaggggtgggaggatcttttgatcccgggaggtggaagctgcagtgagcccagatcgcaccactgcactccagcgagaccttatctcaaaaatacgtacatgaatttaaatataaaaatcaaatgtaaatacatgtatatgtcgcactgtaacaacttattgcttcttttcaagcagtaccaaaaagatactggtaaaagtgggattcacaaagtagtgagaccctttaaaaagcaggagagcggcagcggactggtttaggtgaacactggttaaattttcttgttttttaacgagaggtaagagctgcttatccagttaacactagaccaattgactccacctgtgcctcactttctcccacgtggccaggggagagtggagggtaagtcagtggccgctgactgcctgctaagcttcaagaaggcagtttagactgagcaatgaaagaaaaattgcgggcgcaaaatagaaacggcatttaaacagaagaagcatttgttagaatgagtggatcttctcagatactttatctccttgggcctgggggccatcatgatcaggtatctggttatctccagctttttggggcttgggcgtttccaaagtccagttaaaggtaaacatgatgccgggcgtggtggctcccgcctataatcccagcactttgggaggccgaggtgagtagatcacccgaggtcaggagttcaagaccagcctggccaacatggtgaaaccccatctctactaaaaatacgaaaataaggcaggcatggtggtgggcacctgtaatcccagctacttgggaggctgaggcaggaaaatcgcttgaacctggaaggcggagtttccactgcactccagcctgggcgacagagcgagactttttctcaaaaaggtaaacatgatgcaatggtaaatagtcatgggctaattagaacaaactactcctgttctcccacacccctggagctgggtgagtagacccaggtgatactgagcttgctgatgtggttaagagaccttgattgtttcatggggagtgtaggtgggaaggaggtcaaaggttgtgagtaattagggtttttattatctcttggcttatgagaccaggtcctttgagaacttagtgctctgccagtctccaaagtggctaatctgacttatgatgaaatgccaaacaccctttttgttttcctgttaagtctgtgtgtacagattctatgtttattcccttattttacttagcaggtgtgggtttggtaatttctaaccatattctgctttggcccctctggcctttctaaattaacttggtccacctcataaatatatatctatgagagagagacacacacacacagacacagacacagagtcttgcctctgttgcccaggctggagtgcagtggcgagatctctgcaaccgccacctcctgggtttgggttcaagtgattctcatgcctcagtcttccgagtagctgggactacaggcgcgcaccaccatgcctggctaattcttgtatttttagtagagatggggtttcagcatattggccaggctgttcttgaactcctgacctcagatgatccacccacctcggtctcccaaagtcctgggattacaggcatgagccactgtgctctaccataattttttttttttttgtatttttaatagagacagtttcaccatgttggccaggctgatttcaaactcctgacctcaagtgatctgctcaccttggcctcccaaagtgctgggattacaggtgtgagccagaaacaactaatttcttaacctatcagtaaagtcttggtaacatttctagcctttattattatggtcttccctcttccggagatgttttgacggtgaaggaaaaacgttcttcctatagattagattcttccacttggttaaaaagctgcctctgaccacagtttttaaaatacagctaactgctgcttatccagcattttcttcatgagtcatggctatagtttgctggtttaagctggttttaaaggagggagagagaagcttttgtctcctaaagaataggattaaagcgggaccagaatgagctcagtagttacacaatcattcagagaatgaatcagagctggaaaggggaattttgccttagtttaaggaatcatatctactgtggctacaaagcaactgtctggtcttgccgagtagttcatgaacacatctttggttttccaaggcacttttgctgaattaggtcttcaaagatttttgcttttgaaattatagtccctgagcaggagtggcctgctgaaagatggttatctttttttgtttgagatggaatatcttgtcactcaggctggagggcagtggtgtgatctcagctcactgcaacctccacctcctgagttcaagtgattctcctccctcagcctcccaagtagctgggactacaggtgtgcgccatcatgcctggctaattttttttgtatttttagtagagatgcagttttgccatgttggccaagcagatctcaaactcctgacctcaggtgatccacctgcctcagcctcccaaagtactgggattacaggtgtgagtcactgcgcccagccagttatctgtcttgaaggttaatcagtcattaggtgtgaatcattcctaaatgtcccatctgatgtattataccctgacattttcctttcttcctcccacagcgtgagtgcatctccatccacgttggccaggctggtgtccagattggcaatgcctgctgggagctctactgcctggaacacggcatccagcccgatggccagatgccaagtgacaagaccattgggggaggagatgattccttcaacaccttcttcagtgaaacgggtgctggcaagcatgtgccccgggcagtgtttgtagacttggaacccacagtcattggtgagttgacctcagtaacccaagtgagatcccagggtgctgggacaggaggtctgtcctgggggggctccgctggtcactcacccactctccctccccgctccttgtccctcctcctcctcccccatcatgttctccagatgaagttcgcactggcacttaccgccagctcttccaccctgagcaactcatcacaggcaaggaagatgctgccaataactatgcccgagggcactacaccattggcaaggagatcattgacctcgtgttggaccgaattcgcaagctggtaagtatagtactttaaataaagtgggatgagagtttcttttgcagttctgagaccaaactacagaaatcattctttgcaactaaaatgagactatttgcattgcaactaaaatgtatctgttcactaaattaattggatttctgaaccagatgatcttggatttatgggacaactatggggtagaagtaagtgctctttagcctattttgcttcaagctgagacaccccttttgaggtcatcttagtcatactgagtgagtaggtagctgacttctacatgtaactaattgatcagagtcattttttaaaaatctgggatggttccttcatgtcaatacagaaagttcagagaacaagaagccagtgtcacactgacaagaaacagccaatactggaaacttccagtactgctgaaagtggagtcgggagcttccttatgaagtgtgctgtttggatcactttaattaagagcctggcaatcagatgactctttgctccttaggcatgtgggcagcttgtaagtaattaaccagagatcaagcatgatggtctgggcagagtaacttgtcaagaaaatcacattgtattaagcccagccatgactgctccattctaaaatagaatagcctcatcattcatggcttcatactttctcagatgtttacgtagtcttcccagcaaaactggactgatgtttccgatgcttaaaaactaagctttaggctgggcacggtggctgacatctgtaatcccagcactgggaggccaaggtgggcggatcatgaggtcaggagatcgagaccatcctggctaacatggtgaaaccctctctactaaaaatacaaaaaaattagccgggcgtggtggtgggcgcctgtagtcctagctactagggaggctgaggcaggagaatggcgtgaacacgggaggcggagcttgcagtgagccgagatcgtgccactgcactccagcctgggcgacagagtgagactccatctcaaaaaaacaaacaaacaaaaaaaaccctaagctttagttataagcactgacttggaaaatcagggacctgcctttaggacaaataaacctagtagctatttagggttctggaacgtgaggtttattgcctaccaaaacaattgcatttgtccttgtcattactgtgctcacaggaggcttaactggtgtaattggtaggcgagagtctgccctgtgcattgatctcatgtagttgatggacccacaggctataagggagctgagtagagaatgttcacaaatctgaggcccatcacttggagaagcaagagtttacaacagaatactttatttggaaggtcaaaatcattccttcgtaaagtagcagtttgctaaccaaaatagcccagttaggtggaggaaatccccaacaacctgaggtctcatggaattgtggttgtgtcactttacccaaaataaatgggcttcttggtacctagtgtcatatattggcttactgggccaatactgtgcttactgtgccaagcactatgctgagtacttacttaattctcaacctaaggtgattactattctcacttaatcagtggaagaactgagaaatgaatgtggtcatacagtaaggaactggtacagccggatcctgacacagcctgactccagtaccagggtgttagaactttggctattctgttgttccacctcagaaagcagctgccaaatctttacaagacatccactgtaccaggctggtggtcctgggcctgccccttaggacctctccaactaagaaactgccctgttctgtggccacagcaagagaaccagaggctgccttcccagttaccaaaacttgagccctgtatgcaagcccaggccttgtgattcctctgcctaaggcaatagttcatcttaaaatagtcttagcaaaggtttttctgctcaaggacttgattgtgaaaagttgttctgaatcacttagcacttaaaagcttttttttttttttggagacagggtctgctctgtcatccaggctggagtgcagtggcctgatcatcagtcttgaacccctgggctcaaatgcaaatggtcctcccaccttggacccccaaagtgttgattacaggcgtgagccactgcgcctggcccagaagagttttaaaattgcaattggagtagccatagatttatagaagtcctctgtaggtttcaccaaatgtgaacactaaatgaaactttcgcaacactaaaatgaaacttttttattttgcaggctgaccagtgcaccggtcttcagggcttcttggttttccacagctttggtgggggaactggttctgggttcacctcgctgctcatggaacgtctctcagttgattatggcaagaagtccaagctggagttctccatttacccggcgccccaggtttccacagctgtagttgagccctacaactccatcctcaccacccacaccaccctggagcactctgattgtgccttcatggtagacaatgaggccatctatgacatctgtcgtagaaacctcgatatcgagcgcccaacctacactaaccttaaccgccttattagccagattgtgtcctccatcactgcttccctgagatttgatggagccctgaatgttgacctgacagaattccagaccaacctggtgccctacccccgcatccacttccctctggccacatatgcccctgtcatctctgctgagaaagcctaccacgaacagcttactgtagcagagatcaccaatgcttgctttgagccagccaaccagatggtgaaatgtgaccctcgccatggtaaatacatggcttgctgcctgttataccgtggtgacgtggttcccaaagatgtcaatgctgccattgccaccatcaaaaccaagcgtaccatccagtttgtggattggtgccccactggcttcaaggttggcattaattaccagcctcccactgtggtgcctggcggagacctggccaaggtacagagagctgtgtgcatgctgagcaataccacagctgttgccgaggcctgggctcgcctggaccacaagtttgacctgatgtatgccaagcgtgcctttgttcactggtacgtgggtgaggggatggaggaaggcgagttttcagaggcccgtgaggacatggctgcccttgagaaggattatgaggaggttggagcagatagtgctgacggagaggatgagggtgaagagtattaacctgtgtgctgtacttttacactcctttgtcttggaactgtcttatttttgttctgtaaatgtctattgccgtaaattgttaataaaattgaagtttccattttaaatgtcgagctgacttaaatacttgatccagttaaagttggatgtatgaggctggtagatgaaaccacctgagtcgagggtcttgctctgtcacccaggctggagtgcagtggcatgataatacatagctcattgcagcctcgagctcctggactcatgtgattctcctgcttcagcctcctaagtagctggggactgcaggtgcacaccaccatgcccagctatttttatttcttgtagagatggggccttgctatgctgcccagggtggtcttcaactggcttcaagtgatcctcctgcctcaacctctcaaagttttgattataggcatgagccactgcccagcttcttggtttatctgtttaatttgggcctgaattaagtggttatagaatcattttgtaagtgaggaaacgggttcagattgagccagtgcttctctaactaaaatggatgtgaatcacctgtagatattaaaatgcaggtttggggtcaacctggtggctcatgcacttcgggaggccaagttgggtggatcacgagcccaggaattcgagaccagcctgggcaacatggtgaaaacccatctctaccaaaacaaaaatttgcatgctgtgatggcacctgcctataggtgggaggaccacctgagcccaaggaggttgaggtagtgagccatgattgcaccactgcattccagcctgggtgacggagacccctgactctcaaatttaaaaacaaaatgcaggttctaattctataggcttgaggtgaggcttcagacacgtcttaaattttttttctttgagatggtctctttcccaggctgcagtgcaatggcaccatcatagctcacccccaccttgacctgggctaagccatcctcccacctcagcctcccaagtagccaggactacaggtgtgttccaccatgcctggctgattcttgtaatttttttttttttttttttttttttttttggtagagatggggttttgccatgttgcttaggctggccttgaactcctgggctcaggcaatcctgcctcagcctcccaaagtgctgggattacaggagtgagccactacacctggcccctagatacgttttttaataacctcccaaatgatgctgttggtctgatgtgaccacatgtacagtagcaaagggttagataacagtaactgctggagccaaaattcaagtgcccagccacactgccagaactattgctgtcagtctttaataaagtattagtcacacgagaagggcttggaatcctgatttattccatacttagctaagacctacagtggcaaagatggttcgtactaaaggggttattgtttagagaaagtggaaatgtcagacaaaataacagtcaccggtttttctggtattggcatttgacccaattgtatgtcatggagattatttgaagtaggagtaatatgtatgtgtaggaaagattggagaggggtgagttctctgattt

SEQ ID NO: 652 - DNA, 202164 bp, Homo sapiens
  source 1..202164: mol_type = genomic DNA
agttctcaaagcctggttccctgcccagcagcattagcatctcttgggagcttattagaaatgcgaacacctgggcccttcccttccctttcagtgtccagttcctgtgggatggggctgggccgcttcagctgccccaggagactgagagagtctgctgaatttgagaaagtccactctgctttctggaaggactggcggggcgggagggcagggaggatgagtaagttagggacagagtgttctcgtgtttgtagaggatgtgatgcagcctggacttcaggcagtaggaagaagatggaatggatttgctagagacagattctctagaactttattgctggtagaccacataaaagcttagaaaacagctgcgctttgctccgagacctgccagccatcagggacgaatgagttttaaaggcccttactgctttgtgtcttgagggaatatcttttattaatcgtgaaaaaatcaatccagataacttgcctgagtcatttcagtctcctttttgaggatgcctgcttaaacagcgaccatggtctctggaggggtagagtctcacattcggagttcagtctcttagaaagtacagttcagtgtggaagaatggcagttatgatttcattcagatgtgcccagctgctgacaaattgaatacaacgatcagtggcaggcagaactctcatttgttgtgtgttgtcttgagtctggtgaggtgtatcctttcactattggattttaccattcagtgcagtcagtagctccatttgatgtaagtgtaaagatgggtctctcatttcagtttcagcaattattcttaaaacctttattttccagtgttttaaagtttttaaattttatatctttttttttttttaaacagatttgtaagactccagggcctcccagccgtgaataatctgatggttcctgaaatgactggggaagcagacgcttcgtatggcagttgaagagtgtgtgtctatgtgcatttaaaaccttctttctgtacttacacattcacacgggaagacaggctcattcttgtgcacacttgagagttttacaactgatgaaaattaatttaagaatcagatggagcaacttgacaccagtgggctcaggagcccggggagaaaaatacatcactaatggccagttttccatatggtctgcacgggtaaagaaagtctgcaaaaagaagaaaaaaaaatttgcgcagattaaaccacaaaaatattctccagtttaaagaaggaactaagtgagaaggtgactgagaaagaagtgtgatttcaaacattgcagcggctcacacagtgtttgttgcactttatttttcagtgggtttggtgatttggacggattaaaattctagactgaaaagtaactcctactgtggttatggctagaggaaagcaagttcaagtatgatgggacaagtttgaataatgaactgattcctttgcctatcttaattaactgtatttgagaaattttaatttattattcccccccttttttcctgcatctataggataatattgtaaaatagcaattgaaaccaataattattaaataaatatcaaggaaaatccaagcaaagctttctttttgttggactagtggtgtggtgtttggagacagtctctgaatgtgaacaggaaagcacccatcagcaaaacactatcactctctagggagacagctgggggaatctgactctggcttctgcttttgttttaagggattaacttccctgtcaagtccaagaagacttgcgtatgagaagattacctgatggacttaattctaagattagcttttttcatcaagatggaaaaagatctttaggagcagaaaaggggagtgctaactgggggagcgagaagggagacgagcaaaagaaacaaaatcttgccacgtggctctgttttgtcagcaagaggatttaagactcacccagggcaaacactgggaccactgtaagagcgctggaacattctgcctcttgagtgaaggggccttctttctagcctctatggcactgaggggtgcgccggctggtggaggagcagtccgatggagccctgcgttccccggggacacagggccaagctttgaggtggaaagtttctggttctgaaacaacaaggagagagtctgtttttcttcctaaaatttggactcttgtctgcacaaactctggtctgttttgcacggtttgtgtgcctttttttccctttatgcaatctttttcagctttagcagcagaaatttgtctagttcaggaaacatgctagagggtggcttcagaaggaagatgatcctgtgtattctgtctctgcatccgaacttttgaagagaaaaattcgagctagagggattcttaaagccttaagttacttgaaatctatgtatttgcaaccctttgtctctggaatcatattacactaaactggaatctcaggctgaatgagaataaccaagtggagtaaaaagaagaaaaccgtttcttgatcaccacttaattaacgatgctctttctccaaaggatcagcacgttcttcctctgagaacttgaaaatacaaatggaccccatgtttttttaagcattaccttttcttagaagactgccatcatcttttatagaggaattttttcactatgcattcggtggatctttataaaatactgaccttctaattagattcaggtcagtcttaattaaagggggaaaaaagcaacgcaagccaaccacaaaaacacatataccaatgaaagaaattggtttaaatttcacagcattaacattactttttaagtaaaacagttcattgaagaaagtatgtatgcagcagtggaacatgggcctgtgctttgcagcgattccaacatcctgtgcctgtcctggaaggggcgtgtccccaagagtgagaaggagaagcctgtgtgcaggagacgctactatgaggaaggctggctggccacgggcaacgggcgaggagtggttggggtgactttcacctctagtcactgtcgcagggacaggagtactccacagaggataaatttcaacctccggggccacaatagcgaggtgagctgtggttttgtttcactttttggtcacttccagtggtgtttttgagccccttgtggacttgaaacttccttcatttcagtttcatagacttgctgcctagtgagacttcccatgctgtgagttctgtctcttattctctggcagaaaagatgctaagatggacatagttcacagtaggctgcgcctccccaggtgggtcagttgtccctggcacccctgctgtcctctccctgcactgtctctcttagagggtccgggcagtgggaagacgcccagcagtagggaggccagggcgctttctaaccagggtggggggttaaattagatgatcctaaccaacttttcgtgctccaagtctacatggcaaagagttacccccacccctgatgtcccactgacagtgtgaaaaatgaaagtggtgctgcctttaccttgcacggttaacatctacgttcctttggtgatggcttaacacttggcttgtatgttttcgtacttggaggtaaagaagtagttaatggacaaaaaccatagtttttcacatgtatagggtatattatattgaggctattatgccatatatttgtacatgtagattcctctgggcttctaaaatataagcagtgggattatgaaattcatgcaaccaacatttattgagcaatacttaagtgttaggcattgtgttttaaagaagagcgtgattggtaatttcttgcaaagttttgcttgtatggcaccttcgcaatattcatgttttactcttcactagcttatttgggtatttttaaaatgaggaatccatgactatttcaggcatcttaaaaatgtcattaaatggttattaaatagctactgtaaaggagcaggaattttttcaagtataggtcttagtccatttgtgctactataacaaaatatagacagggtggcttataaacagtagaaatttatttctcacagttcgggaggctgaaagtctcaagatccggggctagtatggtagagttttttatttcttcttggtggaaagaggatgagagtgtctctgaggcctcttttatgaggccactaatcccatacatgagggctccattctcatgacttaatcacctcctataaagaccctacctcttattaccatcacctagggagattcaccatacaaattttgggggcacacaaacattgagatcatagcaatataaacattcagtaaggtgcactaaacttaactctcgattatttttatatgcagtcacccatgtaagcgccaacaatatcaaaatatagagcatttccagcaccagttacgggtacttggtgctccttcccagattttacattctgtcttaatccattcctgctgctgaaacaaaatatcttagactgggtaatccataaacaacagaaatttattgcttacagttctgaagactgggaagtccaagatcaagatgttagcagtttcagtgtctggtgagggctctctcctccataaatggcacctcgttcctgtgtcctcacatggtggaaggggcaagggaagcttccttgggcctatcttacaagggtaggaatcccatttatgagggcagagccctcaagacctgatcacctcccaaaggtcccacctcttgataccaccacatggggattaggtttcaacattgaattttgtggggatggaaacattcagatcctagcacgcccctcctgagaagtaactcatattctgacttctgtcactgcttaatggaaatggaatccttcattacatactctctgtgtctggcttctttcactcaacgtgatgtctgtgagattcatccctgttgtgtatattattagtttgttctttttaactgatgtgaattgtccactgaaggaagatacctggtgtttttcttctcctgttcctgggtatttggattgcttccagtttttggctgttgtgactaatgctgctatgaacgtttgtgtgcgtgtggacctgtgcattcagaaggtggaatttctaagtcatagtgttgcatgtgtttaggtttagtagaaattgcttgttttccaaagtggttgtactatttacacctcatcattaatgtatgaaagttttagttgtaaggccaagagtattttgagattcatttttccactgagtttaatttatgaagaggcttcttttgaatttgaactttttccattaaaaacagtggttttatgcaagaaattatgttttacaaataatatattgggcatatacatacaggcatgcacacatttccccccctcaacacacacacatatctgtacctttgaagtggatacgcttcaaatttttttttttattcttatgtaacaaatcaccccagacttggtggcttaaaacgttacccatttttagtctcacagttctgtagttctgaagccctgttatggtatgtctggggcctctgcttaggtctcccaggctgggaaacgtggtaccagccaggactgctagctcctctgaggctcagggccttcttccaagctcattcaggttgttggcagaaatcagttccttgtggttgtaggactgaggacctccggtcttagaggccctcactagtcccagccatgtggccctctccacagcatgcagtttgcttcttcaaggccaggaggagagtatctgctgtagcttcaaatctttctgacttttcatgtctgaaaaatggcacccctgagccggccatgctcacctccactcctggggaggggattacactgggtgtgcataccagggggtgtggttttagaattctgcctaccacaaaagagaagattccaattcacagacagtagtctggctgtctcactgctgaaactgttttgcatgatttttccacattgcatttttacttttttggttttttttgaagggtacctgtgcacaacatgcaggtttgttacataggtatacatgtgccgtgttggtttgctgcacccattaactcatcatttacattaggtatttcttctaatgctattcctccccctgccccccaccccacgacaggcccccatatgtgatgttccccgccctgtatccaagtgttctcattgttcagttcccacctatgagtgagaacatgcggtgtttggttttctgtccttgtgatagtttgctgagaatgatggtttccagcttcattcatgtccctgcaaaggacatgaactcatccttttttatggctgcatagtattccatggtgtatatgtgccacattttcttaatccagtctatcactgatggacatttcggttggttccaagtttttgctattgtgaatagtgccgcaataaacatatgtgtgcatgtgtctttatagtagcatgattttgggtatatacccagtaatgggatggctggatcaaatggtatttctagttctagatccttgaggaatcaccacactgtcttccacaatggttgaactagtctacactcccaccaacagtgtaaaagcgttactatttctccacatcctctccagcacctgttgtttcctgactttttaatgatcaccattctaactggtgtgagatggtatctcattgtggttttgatttgcatttctctgatgaccagtgatgatgagcattttttcatgtgtcttttggctgcataaatgtccccttttgagaagtgtctgttcatatcctttgcccactttttgacggggttgtttgtttctttcttgtaaatttgtttaagttctttgtagattctggatattagccctttgtcagataggtagattgcaaaaattttctcccattttataggttgcctgttcactctgatgcatttttacttttagttaatttctgttcctcatattagaatctgttccatttggctgggcatggtggcacatgcttgtaatcccagcactttgggaagctgaggcgggaagattgcttgagcttaggagttcaagaccagcctgggtaacatagtgagaccctgcctctactctcccccacccaccgcaaagaaaagaatatgttccatttactgaatgcctgtcaagtagagtgaccaactctcctagcttcccaggatgtgggactgtcggtgttaatacctggaaaatcccaggcaaactgagttggtcatcctactgcccagtgcctgacgtggtttcagacatcttacctcatgttgtttacagcagactcatgggaagatatcattatttccattttatagggaagaaaactcaggctttaaagatgttaaataacctgcctaaattcatgcagcttgtatggaggagaactggaatctaggggtctaacattttcctacaactttattttcttataacttgtgttaaatacaagtctataacttgtgttaaatacaagtcctcaatcccttatcctcaattgttatatcttttttttttatttaattttttcagacagagcttcgctctcttccccaggctagaatgcagtggcacaatcaccgctcaccgtagcctctgcctcctgggtttgagtgatcttcccacctcagcctgccaagtaggtgggactacagacatatgccacaatgttcagctagttacaaattttttttttttttttttttttttttggtagagacagggttttgctgtgttgcccaggctggtctcaaactcctaaacttaagtgatccgcccacctcagcctcccaaagtgctgggattataggtgagagccactgtgcccagctcacgattgttaaatctaagggctctgaaaatagcaagtttttgtataattgtttcaatggcaagacctggcctggactgatgtgaagccgctggttgttgttattccatcacttcagctgcagaaatactgtgttttattatgggggctgcccagacctgtgggtggcactagataattgacaggagctccccttgtaggactttgctaagatttaaaaaattctgaattcaaaatacttgtctctaaggattctcaatcaggggttgtgaacttgtgtcttcatttaagggaatcatcaaaagaaaccttgggttttatttaatttggtttttcatttccgggaaggctgacatttaactcatctctgcccttaccttatcttcactcccttctaccacaagaagcagaaaaaccctgtgtccccaccggccatcccttaagaacactactgaaagaaccattgcaagattttatttctggccacggaactaactaaattgaaggggtcagatctagtcgtctgctaatttcacaactgaattaaaaaggaaaaaaatctgaatgaaagataatttatttcaccctcagctagtatgtaaaatctgttttatattatgtaagtatttaacaaatcttaacagttttggaattataaatgtattcagttagataaattgaatctgaaattaaatactgtgataaatgtttgtctagtctttgagactagtttgcctttctcacattgtgtattctgttgttagaaatttgtgataaaatggtattagctatatttgccagagttaaacatatagtagaggaattcttatcctgtgatacatagcttcatatttggtaaatatgttaatggttctaatcagatggtgaaaatatatgcccccctcaatcctgaaagcacctttcataaaaaagaaccactaccacaaaaaatgaatgatcagccaaaccaacttttcccaaagcaactttctatggcatttggggacggaaacaaaataatccttttaccagtatctcttttgaaacctttgattagcagtgttatggaagaggaatagatgtgtgcttacctactgaaactccaagggggactcttcgtggctggctgagaagtgatgcttttttagaattatttgtccttttactgtgaagcagtaattcaagaaagatgagtttttcttttaaaagagtcctcaataggtgggcaggtatgtcaggcaaaataatgattatgttccataatgaagattatttcagaaaataattacttgggaatgtttttattctatgaaacaatttcttacagatattgtagatgtcgtgcaaattaatcaaggttatttgtactgattgtcatttaacaggaattttttttttttttttttacacagagtctcactttgttgcccaggctggagtgcaatggcgtaatcttggctcactgcaacctccgccccccaggttcaagccatttttctgcctcagcctcctgagtagctatgattacaggtgcccgccaccacacccagctaatttttgtatttttagtagaaacgggattttgccatgttgaccaggctggtctcaaactcctggtctcaggtgatccacccgcctcagcctccccaagtgctgggattacaggcctgagccaccatgcccggctaacaggatttttttgacttgagaataagcaggcagctatgtgtagttgctggaattcgttttgttataaggacacgactactgtagcaatggtctcacctgatttcttggattgggtacatcttctccgatatgctttctctgaccctgccccttgtccctgttgtacacttaacagacttctctggttgcgctgatcatgctttattatagttatctgcttgcctcgtttggtaaaacttattggaagatcaatgtaccctgtcattcttaacttcctcacctctcattgtttagaatatcaattatttatttattttttaaaaaaattttctttaactttttggcccacttcagtgtgctttctttccttattctactgaaatgaactcctcaatgaccacacattgctaaactcataggtttttggtgttttgtttttgtttttaaactgcacttgatgtctcagtagcatcagtagaattgaaatgttgtccaggacaccaggctctcctggttttcctgttactgttctggcctctgctttccgcctttctttgctggctctgccttttttttgcctcatctttaaatgttaacgggcaccaggcatgcatatttttctgtatttcctctctatgttggctttaaatctccctacatgctatgactccagatacctctctctgtctgccatctccttctagttccagacttcattctccaacttgatatatgagatacaaaagtggacaccagtcaggcctcgcagactatcggtcacccagacagaactcatttccccccgccccttgaacctcagatcagttccatgcactgtttccccattttagtagatggcccaagaccagccagtcagttcagctctcaactcaggaatctccctgcgcttcccttgtccccaagtcttgttattagcaagacctcccactgtatctgacttccagataatatctgaaacgtgctcacttcaccaccatgcctagcataaacctcctcatgaatctcttgacttaaactctactatttttctattgtggaggactcaacaatctatgttaagttttttaagtgttttaaaaatattataaaaatttacttctaaagtacttttctttttcctaaaaacattgtatgacacatcttaattccaaaaaggatgggaatttctagattgtaagaatggtctcccttgcagttgaaagaccctcctagtaccattgtctgattcaccctctcctgaagaaggcccagagccactggggactggcaagccaggttctgtgtccacctcactgtgcatagtgatgaccaactttctcaacattcagagaggttagaaaaccattttattttgaaacatttatacagtatttaaagtacttaatctgtacaacagttttagtgggaaaagttgactcattttggattaaagccagcaaaaactcactgcagctcttttatctctcataaattctacatagaaagtgacttttagtagatttgtgaccaactaaggtattataatggtggatataatggagggctgttttatttcctttagtgatggcctgttcttttttcctttctgtttctgtttttccatatcttgattccaagaagttctagctttacctgtccaagtcattcattagtttactcaagtcagtagtaagttgaaaataataattctcttctatcagagttgtagaacctgagataatatgtttttggaagggctgtgaaaatggtatataagtgatgaaatagtaaagtactctataccctttgtacttaaagtaatatacttaagtatattactttccagtccttacaataccacttagtacctggaaattcagttactgttctgactcatgaggttagaaacagtgtttgttgatttttgttcctcagtttagatttgaaaacacatgcattaatttttagcaggtatttactgcatctctgttgtgtgccaggtgctgcgtgtatttgccactgtcggggggcaagagaagtcccagcttatacctcatggaatctacagtctagcatgagggtgaaacgtggacttcgccttcctctatttgcatttccattaggaagagaaagcaagctttcaattgttcaaagaatgaagaatgaggcttcctagagattgtgtggtgaagatgatctttgagcagggccttgagaaatacttaggatttagcacgtttagcgcgtgcttttctcagtggtgcaagaagattaagccacattctggctttagagaggcatttctgagagagatgaaggacacttcgttccccagccccaacctaagcatgtgactgtactcaccttgtcagatgctgttggaacctggctgacaaggacaaggacctatgcattttttcctgccctggaacaaaattgcccttgttggacaggcagtgatgttctgtgcgccttttgactatactgtgaaatgtttgtggtttgtaatggggattttatccatctgagcatgctacactttttattagtttccatggcagatggttaaactagggtgctgccttaataatttgacttatgcaggtgctcagatatgactgtttctgtgcttaatgtattcagcatgtggttgtagtcgtttgaaaagttacataatcatgtgttcatgacctgagttagagataatttattagtgactcagcattaatgactcattttatgcaactcttctggtaaagcaacgtttctgttcatgtgagcatattgtagcatgctaggtgaccacatctaccttgtttccttcctaggtagtacctttaggtattccattacaggagggctgccccactcccggaggtgcattgaatacagagagggcatagttggtggagaaaagccctccttgggatcatctgtagctggtaatagggactgagaagctcagggctacatcatggttgaatgtttgtggattcagtgatctgcatggcaggtttcaaaaccatataatgttaagagatatgaattgcaaaaccacaacccctcagacttttctatacagtaagtcctcaatattgttaagttcttggaaactgcagctttaggtgaaacaacacttagtatgtagtatatacgtaggatcttttttcttgtttatatcagttagcttaaggtaaaattgttttcatatgcaggtcatttttgcttaaagttcagcttctaagaacctatccttgaagttaagtgaggacttaactgtactttttgcaggtaaatttactgtattgagcgaaatgaatagtggaaacttacctagttttttaccctggaaaggaatttaaaccgataaaatgcacttactagaatttgatggatgttccgcttttatctgccagctttatcacgaaggatttcctcagtgggaacactgagagaaaggatctgcatagtgggactggaagggtggagtagtgtgtgaatgaagtcaactaggtatttaaaaaatattcttacattccctgactatagccataattaacgtcattgtcctggtgagtctgtcttctttttttagaccaagtctgaagaaatgggtggcagatgttgtactgttctgatgtactgcagagtgctatagtaggtcagaggatgaagcactgtggaccagtgtggtcagggaagcttcctgcagagtcagggagtgagctggaccttaatgttcatttcggttccgtaaacatttgagagctcgctctaggctagactctgttgggctttggctctacagtggtgaaaaaggcactgttcctgcccagatggatcgtctatcgtgtgtcagagggtggatattgtttgcatggatataatgttgtctttgctgatgacaattgccatatatattcctgtaatttgtgtgtgtgtgctatgtccattatttagtgtagccctcataacatctctctacagctttgtattaatatccttgctgtacagttggggaacctgaggttctgagatgttaatgaaattgtctgaggttgcagagccagatgatggcagatctgagatttgaatttgtgtctgtgtgtttttctatctataagacactgcttcaaaaaggtgaagggaagaggcacccttaaacagagttatgaatgactgtggtatgtgtgtgttttggacatggaagagtttggtgaagtgttggagagtagtggaaagcaaagcgggatcgacaggtgggaccagacatacatagtcatgattataaacaatagtaataaatgtttgtggcatgaaagaagacagtgcttttggtttgggccgtattccaagaccataagaagactctcatattcaaatagaattgtcaaaaaatcaaatgtgagtgtaaaaattaccattcaattcagtgcattttttcaccaatgtggataactgacagttgacagcactggctatgcttaatcaattatggaaataatagtcttaaagaagtaacagacatcagtcaccatgatactatgataatgtacacatgagcctaactcttaattgtagccagttattgtaaactgaagggatttgaggaacagcttttctttttttttttttttcagacagagtcttactctgtctcccaggctggagtgcagtggttgaatctcggctcactgcaagctctgcctcttgggttcatgccattctcctgccttagcctcccgagtagctgggactacaggcacctatcaccacgcctggctaattttttgtatttttagtagagacgggatttcaccgtgttagccaggatggtctcaatctcctgacctcgtgatccgcccgcctcggcctcccaaagtactggggttcaggcgtgagccaccgcgcccagccgaggaacagctcttcttttaaatgtcttaggaattcttattttgaataaggaacctttctagcaaagaggcagaaatgaaacttttgttttatatttaggtcagaatttcatttcacctaaactggcttatctatttttataccaaagctcagtagtgtgagttaattttttatcactgtaatagttatacatattggtaaatgctaagaatgaaaaatagcaatgttctaactcctgtctccccccctccccccacctgttgtcctggccacttaacaaaggctcatactattatttttttgatgaatcaattttaggattttgtctattgacttcattcccatctcgttaggctgagatttagcactcttctctttctttcatagtcactcaacccagctttgccctatcatctaatcattccagtattactgtatcacaaatattggttattattcagtgtttacactgtttaaactatgtcactgttattcccagatgagccaagtagggtactatgattgtattccttcattatttaactcttttctcctcatgataaaaatttcccccccagtggtttagtttatctattgcaaaaccttcctacatcttcagcataatttcatacattcaaaccaattagatggtttatcagttcatttttttgttttgttttgtttttgtttttttcctgaacacctccatctgagagtcctttgtcatccttctgctctctggattggttgctcagtgggcctgctgcccaggtgatttcctgaacttccttttaatcatcatcttgggaattctctttgccccctatttattccacgtgtcgtttatggaatcttgtatttttttggttaaactcctttttgttggaacataatctccagtatcttcctaagaaagtatttgtaagtcataaagtataagacttttaatctctgtaaatgtcttaattgctttcacacttgatagtttggctgggtacagatttctaggtagttttcttcagaattttgtcttcacatttccagagtttttagaagcatagtagttaagagctcaggccccggagctagactcagtttacgttctagctccatcacttagtaatgccatgactttaaatatattatctaatttatctttatagttgtcccttgactatcatggtttgaactttgtggatccacttatatgtggaattttttcaatcaaatacggatcaaaaatacagtatttctgggatgcaaaatccatgtttatatggagaggattatacacaaaatcaacgtttgtatgcttaagttcttgtgggctgactgcgggatttgagtatgtgagaatttgggtatacgtgcacagtcctgcaaccatcccccttgtgtaccagactgtactatgattttctcatttgtgaaatggatttataaataatactttcctcatatgggatttgttgtaaggattcagtggttactatagccatttagaaaagtggctggcacatgatgagggctttttaaaattgactattattactctaggtcctttatatgtgacctaaaaaacattcaaaagtttatgcatgtgttcttttttctaggtattctgaaatttcataatggtctgctttagtaacttttttcacattaacaaggtagagacccatttggtggaaacgatgctcttcagttccagggctttttggttgttgttgctttaagaattactacccacctgcatcctggattttctctgttttctctaacctactagtcagatgtttaacctcttagaataacttcctgacttttaaagttttacatgtttgactttctgagagatttccttactttattttttaagcttttctaatcaaaattatttcagagccatgatggttttcatttctaacatcttgttctaatctactggctgctccagttcttattttatgggcactatattttctcatacttctgtgaggatacaaattatggttttaaacaattttttttttgtccatgcattagatctgctttttttgaggttttttaaagaggtgtgtgtgagtgtgtataggggtggttctgtgtgaatctccccaccaccacccagattttttataattgaggtcttctttaaatgtctaatgatccttgactatttattcaaatgtaagagtagtgcaccatgaatctctttggcatcttttgtgtgtgtatatgtagggggtgtttagctggtgagctttattgtattatataatgacctgggggagaaccagctgttttcttgggactgccaaaggtcagcatccaagcagctttctccgtagtggtccagtttctttcagtaagaaacttccagtcacacacctgtgaatatactcctgttgccagcattctcagagctggtgtgtgtgtgtgtgtgtgtgtgtgtgtgtgtgtgtgtgtgtgtgtgtgcgtgcgtgctgggaaagaggtagacctagttatatgaaagttggaggagcaggaggagggaggaggaggagctaatattgagtatttattttgtaccagacaccatcctaagtgctatagctcactcagtcctcacatcagctctgcagctttgcacctgttattgtcatcttttttttttagatgaggaaagtgaggtacagagacgttaagcagcttgcccaaagtaaggcatctctgctaattgacagagctgaaattgaactcaggaaccttctagattctatgtatttggcttttcacaacatcattcttgttttcaatccttgtcactatctctgctgtgcctgagattcccaaaacgagttgtggctaacccagagaataacccttcagtgcctgatgttggtggagagaagaattgcctagttacatctcatatggctcagcaggggagaggagtgccctcatggttgctaaatgtgggaatggaatgtgaggcaggaggcaggtgagaggttagtacaggtgggaggtgtccccgctgtgtggggaggagggacttttgccactagttctgttacaggtttgggattctaggacactggacactaatgtgcctaatctgtaaggcattctagactcatcttgtgcagttcattcatcttcccgcctcgcaagccagcagagcctgacttggggcctcagctctgcatggagctacctattgggccttcaacagcgagggttttagtcagaaacacagaaatgaatccttagtgcactgggcagtgggtatcgtattttactaggaggtttttgtctagaagttggtcatttctctgggatatggtataggatgggtgggaagggtgccacaaggaaaaacgtgagaatttgtactgtgcaacagtttggtgtttccagttgggtccacccacaaccttgactccaaacttccaaaacaaacacacctgtgcattttgcccaagattctattgctgggtgtttttattgtaccttctggcaacctacatttggtttctcttcctcattgttgctgttttagggaattcttactgacatgtgttgttttttccacttggcctagttagatttggtctactaaaatacagaggagattgtctctatcttagggacttttctttatcctcctagtcaagctcacttccagcctttctttttcctccctgtatataatccctgtgacaacgtttaaggcaaaaccgagatttgtatgttttagctctgttctttctttgctgattaaatttttagagtttaaggaagagttcattaatcagaaccttaacattaaaaaaaaaaaagaagaataacctcgaaagcaccatccttgtcagaaagctctattttgtaaactccttggtagcagaaataaatgtttgatggctttgtttaaaaaggcagtatgagttaatgtttaggacttgggaagttaattttatacagaaaacaagagtgtaaaaaccatctattgtctctccattcacttgatgtttttcacaattttagatttttttttaacctcttcaggaaattcgctacagatggcatttgtgactaattagggaatcacttaaacatgaccaaagagcttttgcttgtctcctaggccttaaaattttgttttcctttaattgtgctttgaaaaacctaactattttcaagattgaaaacaccttaggggagtcaggctctgtaatgtaaactgaaattttcccctagtaatgaaacacttgtttaagtgatcaatatctcttttttaaaaaaagcattattatattttaaatcagcattgtgcaatagaaacataatattaaccacatatgtaatattaaattttaaatagacacattaaaagtaaaaagaaacaggtgaaattaatttttaatatactttaactcaatatatctaaaatatttcagcatgtaatcgatatacaaactactaatttgataaccgatactcttttttttatactaagtctttgaaatctggcacatctcaatttggattagccacactggcaagtgcccagttgccacatgtggctagtaactaccatattggactgtagttttagacaagtctctttctttttgagggctgtggcagagctccatgcttacccagagaacttgttaatgaatgtccaataggaccttggataaaaggcatttaaaaacccttttatttggaaataatttcaaactataaaaattggaataaagtacaaagaatactcttactcaaattcagctatgaacattttgctttattctgtcctttgcacttccatgtgcacgcatacactctctctctttctctctcttgttatatatgtaaggtgttcttcccccctggatcatttgagagtgtacatcttggtcctttactctaaaatacttcaatgtgtatttcctaagaacaagaacataaccactatagtacagttagttatcaacttcaggaaatttaacgtcaattcaatacttaaattattctccatactccacttttgtcaactgatgaactatcctctgtagtttttctttattcctctacacaggatacagtttaggaccacacactgcatttagttgttaggtatctttagacccctgtaatctggaatagctcttcagtttttccttatgttttatgacattgaccttttagaagaatgctcctctttctttttaatagaatgtttggtattttgtgtttttttcccttttttcttttgtttttgttattaaatttagattaatcatcccaagccagaatactacataaatgatgtgtccttttcagggtgtcacatgtggaggtgcacagtagctatctgcccctcattggtgatgttaattttgatcacctggccaaagtgctgtccattttctcaactgtgttgttattggtttttttccccctgtatttgataatctgttgagagatcacttcaaaaccatgcaaatatcctattccttatcagaatttcttccctagatttatgatccattgatgattcttccatgagccagtcttttctatgatggttgcaaaaacggtgattttccaattccactactccctccatgagtactggcagctgacagatgtaatcaagagcctcctgttgttccctatccacccacctacctatctgtgaactcttggatttccacttttttcttcaatgattatttcctttgattatttggattcaaatttggtcaaagtgtcccagatttggccagcaggagcccctttaggttggctcgtgtccttttggtgcaccccagtcactggcagtggtaggtgggcacctctttatttattttctagcttaacaagatgtttcagcatcatcttgtacttaccctgccctgggtctggaagcagtaatttctctgaggaatgctgtttcaatggggaatggtattagaaaccaacatctggcctctagaggtgttcattgttaccggaatatctttgctgctggactcgttcaacagacacacacacacacacacacacacacacacacacacacacatacgtatatatatacgtgtatatacacgtgtatatatacacgtatatatacacacacacatacctacatacacacattcagtagcagtctgggttcaattaggagacggaaaccacacagtgggttaaacacaggaagtttaatataaagaataattaactgccgggcacggtggctcacgcctgtaatcccagcactttgggaggctgaggtgggcggattacccgaggtcaggaattcgacaccagcctggccaacatggtgaaaccccatctctactaaaaatacaaaaattagccaggcatcgtggcacacacctataatcctagctactcaggaggctgagacaggagaatcatttgaacccgggaggcggaggttgcagttagccgagatcacgccactgcacttcagcctggtcgacagagtaagactctgtcaaaaaaaaaaaaaaaaaaaaaaaaaaaaaaaatatatatatatatatatatatatatataaattgaaaagagagaaacagtaagatataaagagactctgtatagtaccctagggccgaaggagatgatgcaagggaggataagctgggaaggggttcagatcttattggagaaggtgtggttcagcctagcacatagcacggaagtttgttagcttagttagactagagctggtctagagttgttgggcaatcagtaaataaccctctggagtgcaggcaagggaggaggctgtccctccatggtagtggtggagtgtgggcagagggccttcaaagtgaatggcccatgcaggggatgggatggagagggacttgcagaaggagtgactactcactttttgaccctcaggccattggcagctgggagtatggacaagtggcaggatcactggtttctatgttgaggagctatagaaagattgtcactaggccaaagctgtaaggtcataggactgtgtgctgggctattggataggcggactttcctggattttctcataccttcatggcatcttccactctgaagagccctggaagtttcaggaactattttcatcttgtggtgtccctctagtcctttttctggagaaagcttaaccttgtgctcactttaaaggaggaatgtttaaaggaattctattgtttattatagagcacgtattgatgggttgggagctgagaggcaataaactgacatacacacacacgtacatacatgcatatatgtatacacattacatatatgtgttttagaaatcatgaatttacaccagtatttccaattccagaccacccctataccttcccccatttcgtttttgtaatcccttcttccatagtttgcttaatgctataatacatctaaaaataatttcaggtttactacacctgtactaatataaaaaccaaacctaccaaaaggatgtcatggactgaatgtttgtatcctccaaaaattcatatgttgaagccctaacctccaatgtgatgatgtttggagaaggggcctctaagaagtaattaacattagatgaagtcatgagggtggggccctcgtgatgagattagtgccctaaaagaagacacatcggagagcttgcgcgaagaagaggtcatgtgagctcacagtgagatggtggccacctataaatgagaagagctctcagggtgaaacctaccttgccagcaccttaaccttggactttctagcctccagaactgtgagaaataaatttctgttgtttgaattacccagtctatggtatttgatatggcagcacaagcaggctaatacagaaaagttcagaatttgcttgcagttcttcttcaccttccctctgcccaccttcccaaactagctatgtacagttggcctctgtgtgagtctacttattctcagattttcaataatatattggaacaatttttagagatttgtgacaatttgaaaaaattcacagatgagctgcatagcctagaaatattgaaaaaattaagaaaacgtgtcatgaatgcataaaataaatgcaggtactgttctattttgtcatttactggctaccctaaaatatatacaaatttattataaaatgttaaaatttatcaaaacttacacgcacaaacagaccacacgtggtgctactttcagtcaagggaaatacagacaaacataaagatgtagtagtattaaattgtaactgcataaacttaactgtagtatgtactacactactgtaataattttgtagcctcgtcctgttgctattgcaatgagctccagtgtcgcgagtatccgcttaaaatattgtgtgatgcttgtcatcccagtgtgagcagtttgtccccagtgaattgcgcatcacagtaaaaagtgccctctcactgttctcatgtatttttcctcctgtttcgtgcaatactgtaaaccttgaataaccaccatgagatccatatgaaatggcactagtgatgctggaagtgctcccaagaagcagagaaaagtcatgacattacaagaaaaagttgaattacttgataggtgctggagacaggtctgcagctggggtggctgccatttcagacagatagttcatcttgtaaacaggaagtgtaaacttgccatatggataaatacagtacagtacggtgaatgtattttctcttccttatgattttcttaataatgttttctttttctagctttattgtaagaatatggtatataatacataaaacaaaatacatgttaatttactgtttatgttattggtaaggctactgatcagcaatagacatgagtaaataagttttaggggaggtaaaagttatatgcagatcttcaactgtgtgggggttggcacccctaacccccgcattgttcaggggttagctgtagttaaatacggaagctcctaagttgcttatattgattaccctctactcccctttcagtgtgtgcagtggtctgaatgtgtcctccaaaattcacatgttgaaactttacagccaatgtcatcatatttagaggtgaggccttaaagaggtgattaagtcatgagggtgaaaccctcaaggatgggattagactccttataaaagggcttgaggaagggctttatttctctgttctgctcttctgctgtgtgaggacacctagaaggtggcatttatgaggaacaggccttcaccagacaccatctctgctgacaccttgatcttggacttcctaacctccacaactgtgaaaaaataaatttctgttcttggtcaggtacagtggctcaggcctgtagtcccagggctttgggaggttgaggcgggcggatcacaaggtcaggagttcgagaccagcctggccaacatggtgaaacccggtctctactaaaaatacaaaaaattagcagagtgtggtggcaggtgcctgtaatctcagctacttgggaggctgaggaaggagaatcacttgaacccgggaggcagaggttgcagtgagctgagatcatgccactgcactccagcctggtgaacagagcgagactgtctcaaaaaaaaaaaaaaaaaaatttttgttctttataagtacccagtctcaggtactttgttatagtgacacatatacttaagtaattatacttaattacttaatgtggttaagtaattcatttaaaatacagttgtttttgtttcagtttgcttttagttttttgatcttttcctcttcattcttatgattttatgttttgaatatatagaacattaacatgcatttgaaagtcaaaaccacataaaaaggtatatccagagaagtaacattacattcatccctcccacttcatccacccatcttgtagatactaacttcattattttctgatttattttgttccttctgtaaaaataggcagatgtgtgtggtgtatatttatgttttcttattttcttctctgcctttgacaaaaggactgtttttgcacttcgctgttttcgtttaacatctggagatcattccatgtcagttcatgtgcatcttcctcatttcttttttacagcacatggtgtgccattatgtatacacatatactactgtatatcgtagtactatattttacccaacaactctccaagtttgaatgcttagggagttcctgtattttgcaattacagataatgctgcagtgaataatttgtgtgtatgttggacgtgtatcttcagggtaaattcttagaagtgaaatcgctgcattgtaatgtgaagacatatatagttttcttagatattgccaaacttctttccataatgatgaaccattttgcattcccagcagcaatttatgagaataccattttctcccacagcttcacccatagtatattaccaagcttttacattgttgccaatatggtagaagaaaatggcactgcagtgtggttttaatttggatatctcctattatgagtaaggttgaacatattttcaaacatttaagggccattttaaaaatcttgtgaattgtctatatctttcatctatttttctatagaaattttggtcaccttcaaattgtaaaatgtctatgtatattggagacagtaatattagtcttttatctgtggtgtatattacaaatgtcttctctcaatttgttaactttgactttgcttagtgtattttttgccatgcagaaggtttaaaacttttttttatctagtcaaatttgtcagtctcttattgcgctggattttgagtcataattggaaagtctttttccacatgtaagtgatagaggaattcacccatattttcttgtagcttagaaaaagactcagaaaaaagaatactattggtaagaaaatcaacatgtattttgtcctcattaggggatttttcattcatgacttccttatagcaggacaaatactaatcaagcactttgagacctgccaggcaatttgtttttaaatgccttctaaaaatagataaagaacagagagataactaactattcaggtaaagttagaatttcacttagggacaaaaatgggaatataagtcatttttttaaaactttgattttttggtctattttgaattagtccctatgaccaattcacttcttttttttaaggttcttgcctgttaaacgggtcattttgtttaagatgttttcttcctgatttcatagagcattttgctcagaatagaatccaagtctcactagtgtcttagagctctgttcattttattgcagggctgaagttatttggaaaggaaaggttatgagctgtaaaattttctttctttctttttctttctttctttctttctttctttctttctttcttttctttctttctgtctctctctctctctttttttctctctctctctttctttctcttttttttttttttttttttttgagacagagtctttctctgttgcctaggctggagtgcagtggttcaatcatggctcactgcagagcattaatttcctgggctcaggtgattcttccacttcagcttagtagctgggctacaggtgcacaccaccatgcccagctatttttttgtattttttgtagagatggggtttcaccatgttgcccaaactggtcttgaactcctgggctcaagaaatccacctgccttggcctctcaaagtgctgggattacaggcatgagccaccactcccgttcagctgtaaaaatttttagccttttctccctgatacagactgaagcaatggatagtgaatgcatctgtgtgtgaaacaggtggaggactaaaaataggtcctcaaatacctttctgccatcagtgtcactaaagccctggcactgattcccttcctggaattaaagtgagtacaagaagaaatacatgatttaccttttattttaaggcaccaaagccaagtccctgcacccacagtgtgcaaacaaatagaaacaacaaagtgtcaagtgcactggataccaatcaatcgacttatctgaccaatactcctaaagaccaagagtattcaaaaattatttctagaaagaagtgaatgtttgattttttttttttaaagcagttaagcacttttgggactgaaacaaaggtactaaaagtaggaaacagaagaaaccagaggaatatcgaatcttggaaaggccttagaaaccatctcatttttaagattaagaaaattaaaggctagaaagtagctgaagaaaggtcaagtgggtaaagtcacactttcacccaacctgtctccacccaacagtgaattctcatgactctggccgtagttattgaagggtaggtacaatttagggccatgaaacagtcaagttactggtctctatggtaacagtcttcagagcacctgatggaagcatttccatacaagtcacactttatgtatttatttatttttgagacagggtctttgctctgtcacctaggctggagtgcagtagtgtgatcatagctcactccagccttgaattcctggcctcaagtaatcctcttccaaagtgctggaattatagtcagtcttccaaagtgctggaattatagatgtgagccaccccacccagcccaaattatactttaaagtgtaatgaataataacaatcaaaaacagacatttaaaatgataggtgtaaaggacacataatttagtgaacatgatattgcaattaaaccttattttggacactctcatgcagccagcttattgaagtgcatgtctcagtctgcacctgccagctcattctgggccagtctctgctaaaggagtgctgctgaggtgtgaaccgttccaaagctgggcagtgaccctgtatcctttgcggaatttagcattccacatttccgcatactagaggctggtttgatatttgtgacattgaatcagccatgttatgttgcacctgcagtggggaatagagaggctagcaggttggaaggtaaacttggcccagggacctaaattactactttggggtagagccaggaccagagagggaccaggtgggattggtagttacaggtaaagagggtactctgcaggtggggaatgatcacatttcctgaaccttgcttttgagataggtcttgattgacaaatattctctctggctctgggaaatgttgcctcactttgttttcagaactcccttcctgtgagtctctgatgacagctcttctcatgcaggtataagccctcctgagcgggcaggcattccctgtgcttgcatgtaagactgagtcttacacttgggaaaaagtcttgcacttgggaaaaagaaaaaaacacattggtgtgccagatatcaggggaacctgcccccagtaattcaacgtgagtccttttctattttccctaagtgtcggccagtctgagaaataaaggaaaagagtacaaaagagagaaattttaaagctggtgtcctgggggagacatcacatgtcggcaggttctgtgatgcccccgagccgtaaaaccagcaagtttttattagcagttttcaaaggggagggtgttacgaatagggtgtgggtcacagagatcacatgcttcaagggcgacaaaagatcacaaggcagaaggtcagggcgggatcacaaggtcagggcgaaactagaaccactaaagaacttctgtgtcccgctgtgcacacattgtcagcgttcaagagcagagaaccggtctgactagaattcgccaggctggaatttcctaatcctagcaagcctgggggtgctgcaggagactaggatgtgcttcatccctatctacatctgcataaggcagacactcctagggtggccattttagaggccccaccctgggaatgcattcttttcccagggctgttaattattaatattccttactggggaaagaattcagcaatatttctcttacccatttttggtaataagagaaatatggctctgtcctgtgcggcccacaggcagccaaactttaaggttatctcccttgttccctgaaaatcactgttatcctgttcttaaggtgcccagatttcatattgttcaaacacacatgctctacaaacaatttgtgcagttaacacaatcatcacagggccctgaagctacatacatcctcagcttacaaagatgacaggattaagagattaaagacaggcataggaaatcacaagaatattgattggagaagtgataaatgtccatgaaatcttcacaatttatattcttctgccatggcttcagctggtccctctgttcggggtccctgagttcccgcaacaggccgtggagctcaggataccttaattgtattggccaggtgagcttagttgatgtggatctgctcgtgcaaggtgagttgaccttactgtaggcagtaggacatgttcagagatctgtaatttcatttggtggaatgtacagtaaccttgataatttggtgactagagaaaaatgggttttttggggggaaagaagtgtatcagaattgttttataactaattagccattaaaatgaacctgaaatagtagtatagacatgcaaattgtaggaccactcctaagtgttgagtataatcatatttattgaattaagtcctcattaatttagctttattttcttatgtttgttcctgagtgtgcctaagtgagtctttccctcctgccctgacgctgcttgggccctcctctgtgtgcacacagggtgagcgtgtgtgggtgtgcatatctcgtcagctgatattatccctctggaggaaaggggtggttccacagagttgaccgtactgctcccaaaccaggccctgcacctgcattgagtcctgggtcttctgagaacatgttctgatgtccttccctagcctgccctcctggagttccctcctcaagatgcaccttctctctttctaagaggagaaaaggtgactccgctgagtcctacctcctcgacaaagcgccctgaccacttggacccagtgattccagagagtccttcgcaggccctcatccttactgtttgtaccacttgctgggcatataacttactgccttctgttatttttagggatgtgtgcacatcttgcatctctagtttaacaacggttgcttgagttagagcctttgtgggattgctgagctgcttgagagggcacaaatgaagcaagactgaggagttaaagaattttaaggctctctctgtttttttgtgtgtgtttttttgtttgtttgtttaagcctttgcagagccatggattttcctagtatgctactgaacactagatcttattccttctatctgactgtatttttatgcccattagccatgttctctttattccctcctccccacaacccttcccagcttctggtaactgtcattctactcagaatctccatgaggtcaatttttttctttagctcctacgtatgagtgaaaaccacacgtcatttgtctttctgtgcctggcttatttcatttaacataatgtcctccagttccatccatgttgttgtaaatgacaggagttcacttttttttatggctgaataatattcccatgtgtgtatatgccacacttttctttatccatttaactcttgatggacacaggttaattccatatcttggttatttgactggtgctacagtaaacatgggagtacagataactctttgacaaactgatttcctttgttttggatatttacctagcaatagggttgctggattgtatggtagttctatttttagttttatgaagattctccatactaaacgttccgtccaacaatatatgagggttcccttttctccacattcttgccagcatctgttattgcctttcttcttggaaaaagctgttttaactggggtgagatggtatcccattgtagttttgatttgcatgtctctgattagtgatgttgggcatttttttttcatatacctgatggccatttgtatgtcttcttccaataaatgtctgttcagatcttttgccaatattttaattgtattatttattttttcctattgagttgtttgaatttcttatatattctgtttattaatcccttgtcagatgggtggtttgcaaatactttctcccattctgtgagttgtcttttccctttgtttattgtgtcctttgcagtgcagaagctttttagcttgatgtgattccccgccgcctctgagctggagtcttgctctgtcgcccaggctggagtgcagtggtgcaatctcagctcactgcaacctctgtctcctgggtttaagcaattctcctgcctcagcctcctgagtagctaggattacaaggatgtgccaccacacctactaatttttgtattcttagtagaaacagtgtttcaccatgttggccaggctggtcttgaactcttgacctcatgatccgcccatgtcggcctcccaaagtgctgggattacaggcgtgagccactgcgcccagcccagcttggtgtgatcttatttgtccacttttgctttggttgcctgtgcttttgaggtcttactcaggaaatctttgtaaggctctttctattttgaaagcatgtttaagaacttgctgcactttaaaaagttgagtttacataagattgtaatatttatcaacatgagtcacattttcactttcttgttcatttgcacactttagatctaaatgccgagaactaggtttttgtttatatagcctcggttgtctctggaaggaaaaatagttccacgtgcctgatccattcagagatgtaattgcatagcctacctggtagcttaagcatataagtttcctagaataatgagacaactaatgtacaatatgtgttttaaattttgtatttgatactttaaatacaaatgcaagactgtgtgctcagttgcctatatttactgacttcttgaaagggtggattgaaggcaccatggcataaagaatgtaggatttggactcagaccttgaatcagttgttagttctgtcacctactagctgtataatcttcaacatggccccttagctgtaaagcaaggataaaaaatcatatagggctgttgtgaggattaagtcgaataatgtatatttatttcatatataaaatatctggtacagtgtttgaccctaagaataggctcaataaatgatcactgctaggcttcctatagtgaacgatgagattaaaaataaatgtgtgtgtgtgtgtgtgtgtgtgtgtgtgtgtgtgtgtaggcactgcctccaccaggacagcccccgggtgatgtgtagagaatctgtacccaccacagcagggaaaatggaggacaaagggggttcctgtgatggcgtgttcaggggcctccaggaggagtaggagttgtgcatgcttggagccctgtgtgagcgcgcctgggctctgtatgttctttgtctatgaaggggaggggctttgactccacaggggaggtttgctgtagttcctgtcaaagggctgagctagactggaactcagattctggttgaaactgtgtccaaaatggtgttgtgatttagattcttcaaacttggttagttaactcattgctggtctgctttttcttttcttgtgtttctaaccaagccaaatgcaacggaaggtaatgcagggaagggaatggtgagtgttacgggctgaacatttgtgttccctcctaaattcagcttaaaccttaacctccaaagtcatagtgttaggaagtgaggctttgggaagtgatttgggtcatgaggatggagccatcacgaatggccttcttaggccctagagagctcgcaccctctttccctcacatgaggatacaaggagaaggtggccacctgcagtccagaaaagagcccttgtcacagccccaccatgctggccccctgatctcagacttccagcccccaggactgtgggaaataaatttctgtggttcatagctgcctagtctgtggtactttgctatagcagcctgaactaagacaggcaggaaaagactaatggctcctcactgatttaaaatacttttaaaaaatctattgggacaaatagtttgtcttaaaatgaaaatactaacaaagtgaagtgcatggagaaaatactaataaaattaagtacatgtggatgtcaggcccctgagcccaagctaagccatcatatcccctgtgacctgcacgtatacatccagatggcctgaagcaactgaagatccacaaaagaagtgaaaatagccttaactgatgacattccaccatcgtgatttgtttcttccccaccctaactgatcaatgtactttgtaatctcccccacccttaagaagtttctttgtaatctcctccacccttaagaatgttctttgtaattctccccacccttgagaatgttctttgtgagatccaccccctgcccgcaaaacattgctcctaactccaccacctatcccaaaacctataagaactaatgataatgccaccaccctttgctgactcttttttcggactcagcccacctgcacccaggtgaaataaacagccttgttgctcacacaaagcctgtgtggtggactctcttcacacagacgtgtgagacagcggactttgttttactgagcttccctttattggactttgcagatagtgtgttttttacaaattgaagttcccgcatcaagcaagtctttcggtgccatgttttcaacagcgtatattcactttatatctctgtggtacattttggtaattgtcacaatatttcaagctttttcatcattatatcttttatggtgatcagtactttttgatgttactgttgtaattgtttcagggtgacacaaactgtgtgcatataagacagtgatcttagtaaatgttgtatgtgttatgactgttccaccggctggccattcccccatttccctttctccttgagcctcgctgttgcctgagatgacaatattgaaattatgccagtgaataaccctacggtgatctctaagtgttcaagtgaaaggaagaatcacaggtctctgactttaaatcaaaagctagaaatgagtaactcaatgaggaagacatatctaaagccgagacaagctgaaaaccaggcctcttgagccaaactgttagccaagttgtgaatgcaaaggaaaagtttttgaaggaaattaaaagtgctactccagtgaacatgtgaatgataagaaagcaaaacaggcttattgctgatatggagaaagttttagtggtctggatggaagatcaaacagctctaacatttctattagccaaagactaatccaaagaatgtcctaactctctttaattctgtgaaggctgagagaggtgaggaaactgcagaagaaaagtttgtagctagcagaggttggttcatgaggtttaaggaaagaagccatctttataacataaaagtgcagggtgaatgcaatggtgcaatcatggctcactgcagcctcaaactcctggattcaagcaatcctccctgccttagccttccaagtagctgggaccacaggtgcatgccaccatgcctggctaatagacaagatgttgctacattcatcaggctggctttggactcctggcctcaggctatcctccttcctcagactactattgggggaacccacccccaatatttcagtgtaggttctttctattttccctaagtgtcagccagtctgagaaataaagagtacaaagagaggaattttacagctgggccgccaggcgtgacatcacatatcggtaggaccgtgatgcccacctgagccacaaaaccagcaagttttattaaggatttcaaaaggggagtgggtgtaagaacagggagtaggtcacaaagatcacatacttcaaagggcaaaaaacagaactactgataagagtccaacaaagatggcaaggcaaagggcaaaagcagaattactgataagaatgtattttcagcggtgcacgtattgtcttgataaacatcttaacagaaagcagggttcaagagcagagaagtggtctgacctcaaatttaccagggcagggtttttccctaccctagtaagcctgagggtactgcaggagaccagggcttatttcagtccttatgtcaaccgcgtaagacagacactcccaaagcagacgtttatagatctgcccccaggaatgcaatccttttcccagagtattaataacaatattccttgctaggaaaagaatttagtgatatcttccctactggcacgtccgtttataggctctcttcaagaagaaaaatatggctccttttgcccgaccccacaggcagtcagatcttatggttgtcttcccttgttccctaaaaattgctgttattctgttctttttcaaggtgcactgatttcatattgttcaaacacatatgttttacaatcaatttgtacagttaacacagttatcacagggtcctgaggtgacgtacatcctcagcttacgaagataacaggattaagagattaaagtaagacaggcataagaaattatgaaagtattatttgggaagtgataaatgtccatgaagtcttcacaatttatgttcctctgccacagctccagccggtccctccctttggggtccctgacttcctgcaatagactaccaaagtgttaggattacaggcatgagccactgcacctcatctgaacataactctcgtatgcactaggaaaccaaaaaatggtgtgactcgatttattttgatctttgctttattatagtgatctagaaccaaacctgcagtatctacaagttatgctgatatatggattattcctatcacttttgtttggcttatcaaataaaaaaagcatctgtaactttatacttgggtttcttttagcaccaaaaagttcagtgttttgggttctaaagattcatttaggcagagtatttaatgatttaagactggtgtagattgaagcttttgctgaaatgaaacccctttagccactcttcctttcctttcttccttcttgaaggtttacatttttctcctttcctcatgacttgatgatgattctgtaattgtctgatctgctacttgctaatttggcattaaatttcaagttaatatgtgtgtgcatcttttttgcccctcaaaatttggatgaaagatgtgaccatagctgcagcagacatgaaaggtgaagttcctcctgcaatcccagaatgtggaaatggtagggagggttttttccctggcaaatcacttttgttgtgcttttttctaaaataagccattgcaatatttcttatagggctttcagcgacagaaatccgtacttgcctgcactttgaggataattgatattaataatgtgatcttaagggcattattggattccagagtgtcttctgaattattaatgaaagattatcttaagcatagttttttagttcattgcattttattgcattataattaactgaaaagtagaaatttgtatatttcatataaatgagaaccttttcatttaacagtagcacataatccattaacatatgtatagaaatctgtaagtatagaaatatgaaatatatacatgtttctaaggcaatcacttcctaccattctactgctaagcctggtctaagctcatcccttgtttggattagtgcactgacatacttggttaccaggcttctcttctggacttttcttttagtccacataacggccaaaatagtatttacaagcatccagagaccaatctaccctctgacttgcttagccctctactggccccttgactcattactgtgctgtcaggccctcttcatcgcttgtgcctctgacttcatctcctgccatctctttgaggtaaagtcttcctgcctgctgaccttcctgaagtgagccaagcttgctcctaggggcctaggcccttagtgccagctgtctcccctgcctgggtggtgccttcttgacacttagattctactgtgtttaaggtgacttcctccggccttccctgactgcatcacaagttatcccttctccaccttttttatcactattagatttttttttctgaaataacacttggattattttacttctttgatttaagaatctataaggtagaatgtttttggatgagaaaaaaaaagaatctgtaagtgttttctaaattgcatatttcatcaaatgaaaactctccaacctgggttttttttttcttgatctttatttctcatttgaacatttatgttttagagaaaatacttagagtccctttccttgctgagattctgtatttctagcaattgatcacttaaacaacgtaaaccttaatagataaatgccataaatccactggccctgtgcattattttatgttttggtcttttttttttttttaaggtttttttttttttttagtatttattgatcattcttgggtgtttctcggagagggggatgtggcagggtcataggataatagtggagagaaggtcagcagataaacacgtgaacaaaagtctctggttttcctaggcagaggtccctgcggccttccacagtgtttgtgtccctgggtacttgagattagggagtggtgatgactcttaatgagcatgctgccttcaagcatctgtttaacaaagcacatcttgcaccgcccttaatccatttaaccctgagttgacacagcacatgtttcagagagcagggggttaggggtaaggttatagattaacagcatcccaaggcagaagaacatttcttggtacagaacaaaatggagtctcctatgtctccttctttctacacagacacagtaacaatctgatctctctttcttttccccacatttcccccttttctttttgacaaaactgccattgtcatcatggcccgttctcgatggtcgctgtctcttcggagctgttgggtacacctcccagatggggcggctgggcagaggggctcctcacttcccagatggggcagctgggcagaggcgctcctcacttcctatacggggcggccgggcagaggcgctcctcacctcccagacaaagggcggccgggcagaggtgctcctcacttcccagatggggcggccgggcagaggcgctcctcacctcccagacgaagggcggccgggcagaggcactcctcacctcccagatgaagggcggccgggcagaggcgctccccatttcccagatggggcagccgggcagaggcgctcctcacttcccagacggggcagccgggcagaggcgctcctcacttcccagacggggcggccaggcagaggcgctcctcacttcccagatggggcagccgggcagaggcgctcctcacttcccagatggggcagctgggcagatacactcctcacttcccacacggggcggctgcccggcagaggcgctcctcacctctcagacggggtggccgggcagaggcgctcctcacatcccagatggggcggccgggcagaggcgctcctcacctcccagatggggcggctgccggtcagaggtgctccctcacatcccagatggggcggccgggcagaggcactcctcacctctcagatggggcggccgggcagaggtgctcctcacttcccagatggggtggcagccgggcagaggcgctcctcacatcccagacggggcggctgggcagaggcgctcctcacctcccagatgggttggcagctgggcagaggtgctcctcacctcccagacgaagggtggccgggcagaggcgctcctcacatcccagacgatgggtggccgggcagaggcgctcctcacctcccagatagggtggcagccgggcagaggcgcccctcacttcccagacggggtagcggctaggcagaggcgctcctcacatcccagacggggcagccgggcagaggtgctcctcacttcccagacgatgggcggccgggcagaggtgctcctcaattcccagacggggtggctgggcagaggcactcctcacttcctcccagacggggcggccgggcagaggcgctcctcacctcccagatggggcggccgggcagaggcgctcctcacctcccagacggggcggccgggcagagacgctcctcacctcctaggtggggcggccgggcagaggcactccccacttcccagacggtgtggcggccgggcagaggcactcctcacctcccaaacggggcggccgggcagaggcgctcctcacttcccaggcggggcagccgggcagaggcgctcctcacttcctcccagacggggcagccgggcagaggcactccacttcccagacggggcagccgggcagaggcgctcctcacttcccattcggggcaaccgagcagaggcgctcctcacttcctcccagacggggcggccgggcagaggctctcctcacttcctagacagggtgggggccaggcagaggtgctcttcacttcccagacggggcggccgggcagaggggctcctcacatcccagacgatgggcggccaggcagagacgctgctcacttcctagatggggtggcgggcgggcagaggctgtaatcttagcactttgggaggccaaggcaggcggctgggagggggaggttgtagcaagccgagatcacgccactgcactccagcctgggcaacattgagcactgagtgagtgagactctgtctgcaatcccagcacctcgggaggccgaggcaggcagatcacccgaggccaggagctggagaccagcccggtcaacacggcaaaaccccgtctccaccaaaaatacaaaaaccagtcaggaatggtggcatgtgcctggaatcccaggcactcggcaggccgaggcaggagaatcacgggagcccgaggcagggaggttgcagcgagctgagatcatggcagtacaatccaggcttggcaagagagggagaccgtagaaagaaaggaagaggggagaggggagatgggagaggggagagcttttttttttttttaaagaagagtcttgctctgttgcccaggctggagtgaagtggtgcaatctcggctcactgcagcctccgcctcccggtttccagcgattctcttgcctcagactccttggtggctgggattactgccaccactgctggctaacttttgtatttttagtagagatagggtttcaccatgttggccaggctggtcttgaactcctgacctcaggcagttcacctgcctcggcctcccaaagtgctagtattacaggcatgagctaccacgcctggccctgttttggtctttatcagtggctgtgtatgctttcacagagttcaaatgggtgcgaacttgtccctggatactttgcattgcatttttatatggatggtcctgagttatacagtactgaaccccgaatactaacacttatgtaggcaccttgatgaaaaactagagtgatgttaggtatgaatgcttgattaagcccattcttttagtgcagaactgccttgtggctcagcctgtgtagctgagatgagcatttcttagccttgcactatatatttttgtgcctcagttctctgtgaagtcttcttatgaggctgaggctgtgcaagacttggtgagagtgttagcttctgaatagagaggcttcagcaacccgtttttgcaaattaatcaaaagttgaataaggcttgttgttaaattaaaattgtattgcctgtttacaagtgatagttatacatactgtgttcttaagatatgaaaaagcactggtggcatttcctgggaaaaacgtagtggatttgctcccttttataactgtatttgtggactttacaaacttagacaccttatgtaactcagggattgtctatattgacaaagctgatgaatttgtgatgtgtaataattaagtagcatctttttgtgttgttaaactttttttttttttttttttttttttttttgagacagagtctcactctgttgcccaggttggagtgcagtggcgccatctcagctcactgcagcctccaccacatcctgggttcaagcgattctcctgcctcagcctcccgagtagctgggattataggcatgtgccaccccacccagctaatttttgtatttttagtagagacagggtttcaccatgttggccaggctggtcttgagcccctgacctcagatgatgcgtctgccttggcctcccaaagtgctgggattacaggcgtgagctaccacacccagccccattatttgtttaaataattacttattggggcatttaaaaatatatttatattttccttagaataaatactgtgttagtctgtacaaattcttttggggctgcagtctcaaaagtggaatgaataggattaaaaacttgaatagtttaaaatttttcttgtatatttccagatatccattggaaagactggcaaaatcatgaggaccaggttttttaagaagagacttctggagtctaaaatttctagatcttatgaagtcttaatttgttgttaattaaaggatataaagtggtttatcaagttttagtttctactttttcatttattcattagatgaaattttaaatattatccatttgtcatgatatggactgacactggttctttttttgagacggagtcttactccgtcaccaggctggagtgcagtggcacgatctcggctcactgcaaactccacctcccgggttcaagtgattctcctgcgtcagcctcccgagtacctgggattacaggtgcccaccaccacgcctggctaatttttgtatttttagtagagctggggtttcaccatgttggccaggatggtcttgatctcttgaccttgtgatccacccgtcttggcctcccaaagtgctgggattacaggcgtgagccaccgtgcctggccccgatactggttctttaacttttgggaggatagtaaattttttaatgttggatttggcgtgttctccccatccattaaaacattgttttttatttaaatattggaaaaaacctttctcctttaatcacaccctctgtatctctaataatcacatttggctttgttttatagttaaatacatacatctatttattttaagatgttattatgatttaagtaataaaggaaaagtgtatgagtttttgctctcaaaatattctttcgtatttgtgtctacttaatttttctgataaattttacaatcattttttattcgaagtaggcaagcctgcagagagcaggctccagctgatgaaaaaagttttcaggccccaaataagggtgaaccagctagaaaccttccttaggattgatattgctatgtagcatggctgtccccatcgacctcccaggcctcctggcttcagtaatttgtgctgtgtctcccagtccctgcctctatgtggctctttccacagagtttttgataatgcttcaaacctacatatgaattgggcagatgtctctgttgctgtatttagtattccagatagaatcctcatatatctctccacttgtctttctttattcccattagggttttaaaattttctttaaatagattgcttatatcctacttaaagttaattctcccaaattggtgttttgcaaatgtgattgctttgcaattttattttcagatcctgtagctatgtataattttttgaaattttgaaaccaaggacaatacacatttatatatatttaaatttatttattacggtactctttgtaaattgagggtggtgtacctagtaaaattctcagtgtgttcttttttctgcactacctgaaaataccttttctattttcagtctacaagtttacagcttctttaattcgttcaggtgtcactttattgagtgctatttgtggagaaacagatacagagtctgaaaatactgcattgcttgtttgttaatatgttcaaatgcacttttatcttctatctttaaatctctgtgaatagatcattcttaaagtccttgcaagcactgaaattgtttctggagattaaaacaaagtgaattctctaacaataaaaatattttaaatagacttagattttattgatggaaggtagaagtacctgggcattccctaaaggggttttattttatgtgggcgcttgttgagaaatgtctgagaacagcatcttctctgaatcagctgcagtggttgctgtggtcatcggccccagagtcttcggggagcaattttgttgacacaggagatgttctcatctagcatgtgtcctcacctgaaggcccatcaggattcttagctggcaccgtttcctgaggagtgcctttggaaggaatcttcagagtaattgtgtgaccactggtaaccttagggaattttactagaggattgtgtctttattttccctagtatttgtacttctccttggaggaaggtatttaataattttggttgacggaaaaacaaaggagtgaactaataaggatagaagctaatatatgaatagcctttatgtgttttatgtttttttaagttgatctctaaggcatttggagagcatccagctacatgatgtcattaccgaacaagtgaagccatggggcatacattctgtcgtactcacaggctggcattttccattatgttaccacatttgtcgactggtgtcaccaagaacaaatgcaaacatctgtcttcttgtagatgtggaatatttgtaataggcatacttaacacggtatcagctttttcttgtttcattgctttagggaaaaaaatgtattgagatggcttgctgacagatgtgaataaagaataaaatgtttgcccttggctgggcatggtggctcatgcctgtagtcccagcactttaggaggccaaggcgggaggatcacttaaggtcagggatttgagtctagtctgggcaacgtagcaagaccccatctctaaaaaacaacattggctgggtacagtggtgcacacctatagtcctggctgctcaggaagctgaggcgggatgattgcttgggcccaggagttctaggttacagtgagctataactgcgccactgtactccagtctaggtgacagagcaagaccccatctcaaaaaaaaaaaaaaaaccagaaagccctcaagatgctcatttgctcattgtcaagtataaataattgccatacaggaaaataatagttgggtacagttgtgtacgtggtgtgagaaattctgaggaagttcttcaggggatgattcagaccagctgaattataagcagaagttttttgttggtttttgttgttgttgtttttgagacaaagtcttgctctgtcacctagactggagtacagtggcacagttatagctcactgtaacctagaactcctgggcccaagcaatcatcccgcctcagcttcctgagtagctgggactacaggaatgtgtcccagctactgtcccatgcccaggtaattaaaataattattttgtagaggtgggggtcttgttctattacccaagctggtcttgaactcctagccttaagtgatcctcctgccttggcctcccaaagtgctgggattatagacatgagccactgtgactggcctataagcagagttttgaagggtaaatgaaaatttatgaggagagtggtttgtccaagagtccaggtagtagacaaggaagctggaagagtggatggagccctgagtaccaaggaaaggatatcctgttttatctgcatttacaaaagctctgttcatgtgtagtgtaggttctgaataggaggggaggagggactgggagctgggactttggttaaaaggcttttgcaagaatctaggcaaaaagggtgggctcaggaaatgggaatggagaggttaaatttgaaagatatgtagggagtaaaattagtgggatcatggacaggtttggtgtaggtggcaagtaagaaggttacagcccagaatgactctcaacttatgagtggatgccattgacccatatgaacaatacaaacgagaaatctgttaaaaattcaagttcaaatttatacatgcaacaacatggattaatctcaagaacattatactgagtgaaagaagctggacatgggtgaccacacatagtacattatttcatttatatgaaactctagaaaagacagaagactgaccagtgattgcctggggccactgagtggtagaggtacaagaagatttttggggtgagaaatcttgattgtggtggtagttacatggatgtataaatgtgtcaaaattcgttgaaaggtccactttaatgtttgcatcttatttgtttacattatacttcaataaagttaatttttaaaattcaatttaggtctgggccagagagaagtaaacatttgtgagttagtggtgtttaaatcgtggctgaaattccaggaatggatgaaatcatccaagccacatattgaggataaaaaaaggaccaaagaaagtggcctagggggtcccaagctttaaggggaagggagggaaataagagcctttgaggacaacaggagtggttagagctgaccagaggacagtgacatgaatccagggaagagaatttcacaaatggaagggtgcagaagtttccctcactgcaaagatgtcaagatcaggactattggattcagcagtttggaggtcgttgtttttcagtgaaattgtggttgattgcagatactgagcatgagagcccagagagggtagggaagactgatactggcattctttcaggaattctggctatgcagggggccagaaaaatgggcagttaggtggttggggcttaggtggttggggcatccagggtccaattcttaacaacgtcaggatcctttcatcttttatacattgaggggctctggtagaaaaagccagatggtagatagggtaattgacggggaggggctcaggagcatgggacaaaaggagagggcagtgctgtaaggtagatgccaaggtgatgaaacagaggggacctggaggctggtgtaaggaggagctgaagctgtaaagtaactccttaggaactgggaaagaggactgaccatgagtgagtagaggggttgcccaggagagttaggagttaggtcagaaaccacgcagtggttttctggtaattttccccagctgtgcctagcaacatgggggtaggcacttccatttccaaaaaaatagatctctgtcacagaataatagtggctgacattttcttaaatctgctgactaggaggcttcaggatacaacctctgcccacagcccccaggccccagggagtgcccgagcgtcctccagatggggtgggcagcacggcccctagcttctcccgtctgcagcaccctctctggatatgctattgctaggagttgtatttgtggtggattttgtgactcttcgagtcaaggttttatttgtctagaaatgagagccttgtctgaggagaacatgcattttttaatgaaacgtgacaggatttgccactggtgttaccagcaggcctgggcagaggcctgtgtcaggtttaaatgtgagctgcaggcagagtcatttgtttgtggtccatcttctaacagtcattttgaaatgtcagtgttcacttctggttggaggaccaccctgagaagattctctttcccaggagtcagtattggcttgtgatgcacgtctaagatcctacataaaaatgactatagtaagccagcagccctgcggcggccagcaattccattagatgagtaggaagagagctgtgctttctgctgttgtttttactggctggtgaagctatacctttgctctgatgttatacccagaaagggaatcgtctcctgaaacttgaagtgttcctctgatgccgaggcctggccttccctgagggattgccccaaggtccctacaccagtgctggcccaggcttgccctctccagtcactctggtttgttgtcaggcagagaattttcactttcatctttgctgctgacttcgccctctcacctcttaattttttttctttgtaaaatttaggaccttagttacgtgtcgtattgagaaagcatagatgactgaagatccatcaggcttggagtcttcattacatacttagtaaggaggtgaggttgggtgtgacgctcattcttctggacccagtgtcctcttctgtgagcaaaggattgtggttgtgtctgccctgacacataggagtgctctgtgggttaactcagaacagaagtgggactctgaacattttaaagcagcacacacattagttgtttttaatgttactaatccagagaagacctttcaacctttcaggacttttcatgcttctcaagatcggtttctcagaatgttctctgcaaaaccatgcaggggtgcaagtggaaggagggagagagtccttggacctgagaacctctgagatttacagactttgttaagataatgaaacagctctgtgaactattcttagagaaaagtgattctgtgtgtaaattttaagtgtacttggtgatattatgctcagaatactctattctcaccctactgaggtattttatttatttaaacaaacccatcagtccttgtggtatatttacttagcactttatttaattgaattgcttcatttgggaaaacttaccgactcatatggatttatgccttgtttggggcagttagcccttgagggtgaagtatttctcagtgtcactgtgcataacagagatattaataataaatgaatttgttagttcttgcagtaaaacaagtatcctctataggctggttacatcccacatctatttagcattggtataaaaagacatatgagaaacggttctgcactcaaagagctcttacttgagggccagagacatgcttgtaaggcagtaatgtacaaatcatggaaaactctagtgtgataacttagcagaaaatgcttgttttgatgatatcagagaacccatttcaaaagcagtaacatttgatttgagtcttgataggtaacgaggtttcctgactaaagaacaggagacaagtgctgtctgcccagggtatttgtagagggtgtgagaagaccagcagctggtggtgggtggggctggagggctgagattagagacaggctgggccacaccgggcagcatgtgccaatctaagccgtttcagctttctcctgggcagtggtcagccatgtacattacatgcatgcttcccttcactacatgttcttttatattgaataaggaggaatgtgtaatacattaagatagccttcataggaagattctgcccctaatttgttgtttatgtgactttctatgccagccaccctcccctcttcctcttacctagaaaagaaatgggtgtccacttcgtttacagtggtctctactgatggaatttgggagaaacacccccttttgaaaggaaaaaaaaatcgttctttgccaattactgctgtgtaccttcctggttatattctcaaaggaaactaatgtcatcttgtattagggtactctagagggacagaattaataggacagatgtatgttaaaggagagtttattaaggagtattaactcacacgatcacaaggtggggtctcacagtaggccatctgcaagctaaggagcaaggaagccagtctgagtcccaaagctgaagaacttggagtatgatgtttgagggcaggaagcgtccagcacgggagaaagatggaggcttggaggctaagccagtctaatctctccacgttcttctgcctgctttttattctggtcacgatggcagttgattagatggtgcccacccggattgagggtgggtctgcctctccgagtccactgactcaaatgttaatctcctttggcagcaccctcacagacacacccaggaacaatagtttatatccttcagtccaatcaagttgacattgaatattaaccatcacacaactgaagctggtaaattaaaaaaatttaaaactcccagaatttatcttctcttcccagttgaataggccttggtacgaattttagacggcttctttgacagacttttctgtgggcctgtccctgtggactggctttctgtctgttctgctcttgcccattcacttattcatatcctttgtaactctgaagggcatctgcccttgactctggccttgggggacttggtgaatgtagggcccatctgggctaagggtcagagttaagtcttctgatgttggtaaaataagacagttgaagccttccccccttcccttttatgcctccaaaaaaaaaaaccaaacaaacaaacaaggaaaaaaaaaaagtgaggctagagtaactataaataacacaaattaacagatttcatgccagcacaatgtgcctgttggccaagaagcagcacttcttatagctcctgtatggctcctgtacagtgtcactccgggtgtagcacgatgcactcttgggcattcctggtatctgtccatcatggagggtttggtagggtccagggcctcaaatggaaatggtcgggaactgatagacccttaactcatcttgttctgggttggcagcctcgagtgcacatgtcagtgtctgcccaagaggctgtattcttatatgtcatatgctttaagaatcagtcttcaagttgatactatttttctaagtgatttggaagattgaattgaaagaccattgttggaaggcaatggcagcaagtagaatgtggcatttatgaagaattgggttccgttaaaaaatgagtgtagcaaaaaccagacagtcaggtaaaaggggaagaaaaatctgttaatgtttatttggcaggtaattgttgctgagatgtttacttaatgttggaagacatggaagatggtaagaataatcccacaggctctgagcaggtggaataggctgtatgcaagtaagaagccctgagcaagtgaaaccctacccaataaagaggtctagcaaaaagtacagttcatgctctgtcatgtataatgcatgtgcctatcagaaaatagcctgttactacagttatgccaccattagcataaatgccaccattagcagaattacattttaatgtaattattgatatagttgaacttaggtctccaattttgctatttgttttctgtttatctccttattttgttattcctgatcctcctttcctgccttctttagtgctaaccaatttttttccatgtatctttctgtttttagttttatttcttttttaaagtgattgctctaaagattgtaacattcatcttggatttatcacaatatacttaaagttgatgtagaattgcttctgtggtgatacaggaagcttgcaacagtgtacttccatctgtccagtcctttgagctgtccttgtcaggttcagcctctgcctgtgattgggacccctggtgggttttgagcagagtgatatcaggagcagctattgctgttagctgttcctgttagcagtacctccagacccactgattattctaatagagcagtattcaattctagtttttagcaagtttttaaaaactttgagtgcatggttttcactgtttaaaaatagcaatgtgttgtcccttataattgagagagatgagctttagggtccctgaaagagaatctcaaaagcccgtttaaccaatgtgccagattgcctgactttttatgacgtttttcttaattagtggatttgtgttatattttattggctcaaaagtgaatccctagctcatagcttatttctcaaatcacttagcattttaattacttttcaatttttgagatacaagtcacatattttctttttaaaattaatatatgtactttctcattgtaaaagacctgaactatacagaactgtaagaagtaaaagtcttagttttccttccagagagaacatgttaggaaaatctcttggcatctgaggagctggctgtctatttttacttctatattgactagctctttttccttctaataaagagtgtatattggtttaaattataccaacttcctctgggttttagaggttagcttatttgtagacgagtctacctaccacatctatttctccttatggcttagagcattttctgatcatcagcataaaattttaggtgccttattcattttgccccaagaatgttcaaactcctcaacctcagaaatgtttctagtagttgaaagactgttttgcgattacttttattggattctacacagaagtacccatagcatcattgaactagctctgttgcataactgtcctgtgtctaaaaatacactgctgagtagcatcagctcttgcccagggatatgaacccacactctgggttatttgtactgactctgaccacagactatcttccaatatatcctgcaaaatgatcctttatggaaaacaccaaacttcttccagtgaagtctgatactgttgtagttactgacagcataacagactgcgcttgttgtttgttcatccaagtttgactagccaacattgaaggattttttttttttcttaacagatgaggtctctctctgttgcccaggctggagtgcagtgatgcagtcatagttcactgtaagcttgacctcctgggctcaagcaatgctcccgcctcagcttctcaagtagccggcactacaggtgtgtgctcccatgcccagctaattttggtattttttatagagacagggtcttgctgtattgtccaggctggtctggaactcctggcctcaagtgatcttcctgcattggactcccaaagtgttgaggttacagatgtgagccatggtgcccggccagagggattttcataattatatttatacttctctgaggtctttggtgtctggggttgtagattgtgtccatctgtacttaacccatgcacacagagtgttgtttagtgaatctgacttgaaactccatgcaaagtcacagtcttggctgggtgcggtggctcacgcccttaatcccagcactttgggaggtcaggaggtcaggagttcgagactagcctggccaagttggtgaaaccccatctctactaaaaaaatacaaaaattagccgggtgcagtggcaggtgcctgtaatcccagctactcgggaggctaaggcaggagaagcgcttgaacccgggaggcggagtttgcagtgagccaagattgcgcgtctgcactctagcctggggggacagagcgagactccatctcaaaaaaaaaaaaaaaaaaaaaagtcacagtctttgtattagggccagggagtattgtccagctattcactgtttagagctaatacttcctttattccctgttctatcacataaaaaactatagaaccttctcttgctggctgtgtgtacagtgttacaataatttacaatgcttaaaaataggcagataattgctctgggatccagatgtggaggttgagatgactttattggggaatgtgttaacatatcacagatcgcagcaagggaactaacatttgtgtataaatcactgttacatctttgagggttaaggcatctatttttttattcacttagagtaccaactagatttttttcaactgtcattttgctgcctatttccatgtaagttgaaggtatgatagtcacattttttttgtttttgtttgttttcttttgaggcggagtctcactgtgtcgcccaggctggagtgcagtggcacgatcttggctcactgcaacctctgcctcctgggttcaagtgattctcctgccttagcctcctgagtagctgggactacaggcacgcatcactacgccgggctattttttttgtatttttagtagaaatggggttttgccctgttggccaggctggtcctgaactcctgacctcaggtgatccacccccccggcctcccaaagtgctgggattacaggcgtgagccaccgcgcaaggccgcgtgttttttttttcttttaattaagtgtatgcatacagttgccatttgcaaaatcttactttcataaatacatattaaaatagtgaaataatgtcatatgaaaagaaaaatttagttttgtttagagatgcacagaatttctctttatttagatgtaaaccaaagacaattatgaattatttatcaacactttacctttcaaaataaattaaaaaaacccacaattttgtgttaaatatggaggaaatagaacgtatcactgagagccaggtaatttgaccaaagaaaggtacagtcaataaaatgacttctcttggatctcttccttattctaatcacacttcaaggaagtttttaaatttaaaaaaataatttgaatgctatgaaaaatattgtataatatttaggaactgtcaagtgtagttttatatctaactagaagttaaaatatggaagtgtgaaaatgaagatgaagatgcagagagttagtttagaggaaagagtactaacttgggagtcaacatgccaaggttcctttggtctcagccatgaattaagaaacctaaaacaagtcctttattctgtcttagcttactgtatcaccttctttccctttgggtttttattatttttattgaagcatgtattttctagtagttcttagagtaactatctatagaaggtaaacctagtctttgtatttcagaaatatcttttgtttcatctttactcttcctgggtttggaattctgggttagctggttttgtcttagaactttgaaaatatgatgttattgccttctgttattcattgttactgttaagaagtctgctgccagtctaattatcattcccttttaactgttttttcagtctgctagttttcaaggttttctctttatccttaatgttttgcagcctcacagcaatctacctagatttgttttttgtttgtttgtttgttttttaagacggagtctcattctgtcacccaggctggagtgcagtggcgtgatcttggctcactgcaagctctgcctcccaggttgacgccattctcctgactcagccttccgagttgtgggactacaggcgcccgccaccacgcctggctaattttttgtatttttagtagagatggggtttcaccatgttagtcaggatggtctcgatctcctgaccttgtgatccacctgcctcggcctcccaaagtgctgggattacaggcgtgagccaccgcgcccagcccctagatttgtttttatccagtctctgcttggcactcattgcgagctttcagaattgagattcaagtcttcaattatggcacatttttagcgttagttctagtattgcctccccaccactccttctagctttatttctggaaatcctactagatgtgtttcttttcactctacctgttatgttacttcacttctcatagagagaagtgttttatctctattctatacacagagtgaatttaatttactaattctctcgtttactgtgcttggtgttgtttctccccatctactgaccatatatttcattttcaggattttgaataggtttttgttttcataactactgcctgattttgtttctaaaaatttttttttttctggttatttttcttgtgtatctctttggaagttttttttttctttttttcttttttcttttttcttttttttttgtttttgagacagagtcttgctctgttgcccaggctggagtgcagtggtgcgatctcagctcactgcaagctccgcctcgcaggttcacgccattctcctgcctcagcctcctgagtagctgggactacaggtgcccgccaccatgcccagctaattttttgttagtagagagggggtttcaccatgttagccaatagggtctcgatctcctgaccttgtgatccgcccgccttggcctcccaaaatgctgggattacaggcatgagctaccgcgcccggcctggaagttttaacacatttatattaaagttgttttcaatttgccatgtttttattttgtcaggagaaaatttatgttttgatggttgagttttggttcgtttttctttttttttttttctttttctttctttttttttttttttttttttgagatggagtctcgctctgtcgcccagtctggagtgcagtggcgccatctcggctcactgcaagctgcacctcccaggttcatgccattctcctgcctcagcctccctagtagctgggactacaggtgcctgccaccacacccggctaatttttttgtatttttagtagaaacggggtttcaccatgttagccaggatggtctcgatctcctgatgtcgtgatctgcccaccttgacctcccaaagtgctgggattacaggcatgggccaccgcgcctggccgtcagtctttcttgaagttggtttccctcacaagctttgggcttttagtttagaagcctgtcttaagtggacttctttgtccccctctgtgccctcacctttctggagtggttttgctattgtcctccccaggatcctagtttagtacatgatcttattttggaagttcaggctcctgcccttctcagtagtgagtagagggccaatcttttcccttcgaaggctgcaggctcttgagcttcctcctgctgccccagggatgggctttatctcagccatagcctccggtagtggccacagacctcttttcagtttctttccacagtggtttcgtgctgcgtcatactcggagccatttgcctctgctcccatccttcctaactggggtgtgcctttggcctcttcctgtttctgaacagtagagctgtggcctcagccttatcgccaggctctgttgttgtaccatgtgtcttgtttgttctgttggtaaacatgcctgccttccttgcttccttccatcctcccatctatcattgctaccatttgccatagtgagtgatacgtaaaacctgaactcacaaggcattttgcccagaaattgtcttagcttcttggtctttactaaataatctcaaggtcccgtccagctccaaaaattctaagttgccgtatacacagcaagagaatttacctatgaccaatcactttcctgtccttatgcgtctgggccaaacagtctcatgaattattgatcgcagaagatgtccaaagtattgtggcctctgcagaagcttttccagttttatttgccttcccaattcttattttctaagctggactttgcttttggattgaaaaaaaaaaatctgaataacgctttgggtcctgttggctccaagaccacatccatgggaatggagttggccactgtcacctcttttctttctcagtacccacctgctttcctctgacctggcttcagagacctggatgctcccggaaacagcttcttgggcactgaggactcatttgtactttctcttaggaagttataacatattgttcagcaagctattttaatgtggcccagaggggactcaagagggtaggaggaggagtcgtcagccagaaggaggtagaattcacttttttacaagcttctaaagtctcttcatagatgattgctggaattgtttgtttgtttgtgttttacgaatgatgtttaataaagaactgccaaaactgcagttagcattttttgaaaaataaataacttagtaaagaagcagccatatggtatctgtttagaactggaagtgcagaatctgttttcaaaaatagacctacaaaaagactgaacacaaaccaaaaacccttccaccttaataaaaataattcatggttaatttttttaaagatgtatgaatttaaaacttttacagctagtacattaaatttggcaagtagaaattctgaggaagaatgaatttgattccgtcaggtggttctcaaagattcttttattgtgaactttctaagtagaagaaagaattgtaaggccggtgcggtggctcacacctacaatcccagcactttgggaggttgaggtgggaagatcactgaagttctgggttttccatccaaatatcccacttcaggaactgcaggagtttgagaccagcctgggcaacatggtgaaaccctgtctctacaaataatacaaaaaaaaaaaaaaatcaaatctgggcgtggtgggatgtgcctgtagtccctcccagctactcgggaggcgaggtatgaggatcacccaagcccatagatcgaggctgcagtgagtcactccagcctgggtgaccctgtctccaaaaaaaaaaaaaaaaaaaaaaggagcttcctgaatctgacagattgagttgtacgtggacatttgagctttccgtaaattttctttctgtgattcctcttgattggtttgtctgtaaaagattatcattatctgaagagtaattatctaaaagtatgatttgaatttttgcataaaaaattatcattaatggtaaaatgatttgtatcggaattgagttgttttcttcattttaacttcatttatttatttatttgagacagagtctcgctgtcacccaggctggagtgcagtggcgtgattttggctcactacagcctccacctccaaggttccagcgattctcatgcctcagcctcccaagtagctgggtagtttaacttcttgattcagcaaaatgttcttagcccttttgaacagcatgtgacaggccatttgtcttataaagcatatcaggaatctatctctagtagtgtttcacggcatttgtgaactggggtagttaactcagttggttaaacccctctgttggagcttcagcccctggattgactggttcatttctttcagttttctgcacacagagccttcgtcttaaaagaggaatggatcctcacagatccatcccagttatgaaagcaatttcagggtatacagcctggggatggaatgtatgtcagtaccattttcattaaaatatacacacatactctctttttcttttttaaatacataaaaattacatacagttgttgcctatggtgggacaagcaagaaatttaacatttttaatctttgtagtaattgcatagtatttaatagattattttatcatgtagtctaggtctctgtgcagccataacctcacagaaaaatgtgctatgatgtagtttaacctgtcttgaaggtgtttgttggagttattttattttatagtgccacagaaatgtgccaaatttcaagaagtgtctctatttatatcttattagaattcatttaaaaaatacaaatagattttcatgcaaaggtcatgattataacttcaaaagagcctttattttatgcagcttttattttgttataatgtcttacagggaatgtcattttacaagggaggaaaattgagtatcaagctgctttgagtgactgggctcagtggctcacacctagaaattccagaactttgggaggccagactgggaggatcgcttgagcctaggagtttgagaccagactaggcaacatagtgagaccctgtctctacaaaaaattaaaaaataaaataatagctggatatggtggcatgcctgtagtgccagctacttggaagattgaggtgagatcatcacttaagccagggacatcacggctgaagtgagccttgattatgtcactgcacttcatccttgggcaacagagtgagacctggtctcaaaataaaaggaggctttaagttagcctctgattcacaatgaggcagaaatgggatcctgagacgcagagcattcatttgggtggaaaaccttgttatattttgcactgggacattttcacatgagattttcaaaggcgggagctgaagtggtgtgtttttaaaagcaaggtacagaacagacaatgctatcatttggttttagaaaatctatacgtgtttgcttctacatgcatggaatatctctggaaggatatgcaagaaactggtaatagtggttgcctctgggaagagaactaggtggcaagcagacagagggggagggagatttgctttctctgcatcccttttccatctttgacttttgtaccatgtacatgagatgcacattcaaaaaataaataacagtctggttgcagtggctcaagcctataattccagcacttcaggaggccgaggcaggcagatagcttgagccccaggagtttgagaccagccatggtctcaaactagggcagcatggagaaaccccatctctataaaaaatacaaaaactagctgggcatagctgggcatcgtggcgcatgccagtggtcctggctacttgggaggctgacacaggaagatcacttgagccctggaggtcgaggctgcagtgagtcaaggtcatgccactggcccggcatggtggctcacgcctgtaatcccagcactttgggaggctgaggcgggcggatcacctgaggtcaggagttcgagaccagcctggccaacatggcgaaaccccatctctactaaaaatacaaaaattagacgggtgtggtggcaggcacctgtaatcccagctactcaggaggccgaggcaggagaatcacttgaacccaggaaacagaggctgcagtgagccaagatcgtgccattgcactccagcctggacaacaagaacaaaactccatctcaaaaaaaaaaaaaaaaaaaaaaaaaagattgtggcactgcactccagcctgaatgacagagcaagcctctgtctcaaaaagcaaaaataataaataataaaaatacccaaattacataagtcttcagagtggacttattcaaacataatgaaatctgtttgtatttcttgtttcttttacttgagaggtattattagggaacattattatgaactgcatatggaagataatcttgaaactgttcatcagagaattgattcaaagtggtatattaggacagaaaacccagatacccaagtttaagcaggggtaccctcactagattgttggggcaaattgtgcagaggtgacaaaatgtgggtggagtcagatagtagctctgacattaggcagtttatttgaagtctctgtttctccattttctcttctagaaaacagggcaaatgtggtagacatccactgtttttgacatcctgcaagtgagctgaaatcgtgccactgcactcctgcatcctgcatccactgacccctcgtgccagttctagctcccttacaggctcctgccagaggtccagttcagctgtggatggctgatgacctcgcctaagctttactttttcctggaaacagcaaaatggaatcatggagtgggatcatgaccttctcagaacagtgagatacagagacactttagatagcacatgaggaaaaaaatatcgttctttcccactagacttaaatgagaggagagtgagaggtttgagtaacattcttccacaattctaacagtagaaactggagacaaagcccacacggaggagaactgggagcatggagtgagatggggccctagtgacactggctgggctggcttgagccacagctgaagctcattcggcccctggagatgattagcctccctacttcaggagccagttcactttttggctctagtttctgtcatatgtgttagaaatcaaaatcccaactgatacagggtgatatcagttaaatattagtattatttgatcattaaatgacgtgtttatgaagtgcactgcctgtcgtatggaaagcactcagtggtcatttttagaaaatttggtgagaagtccacctcacatttcactaataacttattctaaagtgaagtggaggctgacaagagagattataacagcgtcttttgttccttaaagtggtagaagtaaggccaaatactttaagataaaataagtcaaaataagtcttttttggtattttacagccaagaagcactagatctgcataggttcagagtagaggccatttgaaagtattcatttgagaatagatttgaatcccctgttgttttctagtttatgtttgtatgtttgagacaaggtctctttctgtcagccagactggagtgcagtggcacgatttcagctcactgcagcctcaacctccagggttcaggtgatcctcccacctcagccacctgagtagctggcactacaggcacatgccaccatgcctggctaatttttgtattttctatagagatggggtttctccatgtcgcccaggctggtctcaaactcctaggctcaagcgatctgcccacctcggcctctcaaagtgctgggattacaggcataagccaccatgccaagccattttctagtttttttttttttttttttaatacaattccattctatctgcttttttttttttttttaaagaaaaagctatttgggtgacttcaaaaaaaacaaaaacagtaggaattcaacaatagcaaaacaggaaaggactgatcaggctctctgaagaggacagtctatgactgcatgatgattttaactaccttccttcttctccagatcctccaaggcagaaaatcagaaaagcaactagagagatggaaatggattttttttttaagtaaagcatttaacattgaaccacaagacttactgagttatgtaatagcagaaatatcattgttgattttgtgacatgtcagtgctttcctaaaagtgcagtgtggcatattttttaaagattaaattgaattaaatatcaatttctattttaagaatttgagtagtgtgagataattggaaaggccccggagtgtttcagtaatggttgagaatcattgttcttaataatagaagtgaactctgaaatgccaagcattttatatactctggctaacctatctttaaagtaataatgtttctaatgcactggagctcatggcccccattggcaatcaccttgactcttcccctcaggactttcatatgatgatctcatcccagctccaccatatttctaaagtgtcatcttttattaccaggaagtgtaatctgcaatatatggttttgtttttgttgcttcattactttcatattctgaaaaaatagcacacactatagcaaattagcaaacgttaggcatataaagaactaggaaatcgagttgatatttagcttgtttttatgcaacagtaatggaaacttttagcattgtgtatcagcatgtgctactaatatcaaacaaggtctcaccaacttaacactgctcagacagaaaacttgaagattaaagtaggtcatgagtagagtgggatgggagttgaactgtaaataaaggctaagtcaggttcttggagagaaggttcttaaacatcagtgaaaatgtagtctactaatgatgctaataggagtttcaacaacaacaataatagcttatgcccatgtagctcttacatggctacgttctaggcactttacctgcattaacctgttcagtcaaccctccaaggcagggacttcatcaggaagcagaggcaggggttaagtgacttgctcccactgcacttggaaagtggaggagctggcgctgttcaccacctcttgtcctgtctccttctggagcattcctttgacaagccaccgcttgaagaagccaacgtgactgctgccaaggagactgagtgaacagttagagtgtggcagtcgaatcagtcatcgtcgtcatcgtggatggctttgcacttggaccagaattgaaaaacaatttgttcagttccacttacaaactatggagtttatctccacgtggtaatactgtcttaatgaaattaatacttttcaaggagaagacatttggattaaacaggttatggtgaccttaggtatctgaaaggctaactcctccaagaagctgcctttgttctcctgagtccacaaagatttttccccagaacttatttataatactcattcatcaactaccttgtcatatagtgtgtttgtagcattctttccatgttaatatattcagcaaatgtttattgagtccttgctgtgttctggtggttgaagacatggatttaggacaaactgggtccttgaaaactcggtaggtttcatatgggcggggagacaggagaccttactaatgagaatagggtgtgcagttgtcttgagatgagtgtgagaaaggcttaattttcttagcttcaaactaggaaactatgaatctctatgttgacatgtcctgctagttggaaatcttgattacacagactgtatcttgacttattttaatagtgccgttaggatactattaataacataatgatgcaaagtcctgctcagatgcagatattcatcagaagtaaacagcagccaagcacagtagtgcccctatagccccagctacgtgggaggctgagacaggaggattgcttgaggccaggagttcaagcctgcagtgcactatgattgcgccaccgcattccagcccgaatgacagagtgagaccttgtctttaaagaaaaaaaaaaaaaaaaacaagaagtaaatagcagacattttccaggaattggtagtgtggatatattgcaaatatgggtggtattttctgggctttattggttttccaaaatgggaagaaattggggaagagtttgaaactctgagaagctacttctttagtcttcttttgtattctctcatgggcgctctgccggatcagggaggagacttgtcacaggaatagaagagtgcaggggttttgcttctagcctgctactgacttaggcaacacagcttattccttttttcccatgtaatttcaaaaactcactgttttacttcttaaagtcttagaagtggacaaagctgtttataagagcagtatccttttccaatagcagtatccttttccaatagcagtaacaatgaacataggaaataccatactagcaccagctgccattagagaagagttcctggtttcagcttttcagccgtgaatttactcatgaatggtacctcctgggactcatatttttgttttaaaacaggtttgaaatgtaacatttttccaaagtagcttattaaggacatttaaaaatttattttcatagttatcaaggtgttattttttctttaacattgtggacttgctatgcttacctaagccaagtgttaaagaagttaaggctgggcatggtggctcacacctgtaatcccagcactttgggaggccgaggcgggcgggtcacttgaggtcaggagtttgagatcagcctggccaacatgcagcaactctgtctctactaaaaatacaaaaattagccagacgtggtggtgggtgcctgtagtcccagctactcgggaggctgagacaggagaattgcttgaacccaagaggcagaggttgcagtgaaccgagatcgcaccatggcactccagcctgggcagacagagtgagactccatctcagaaacaaaaaagaagttaagtaatgaagttggaatttttaatttagtatgttcttttttgttggcaattcagcgtgttccttttttgtccattcatcaaccacttgttgagtttctcctgcatattaacatttgccactgtgaataaaacgataaatgagaggtggtctttccctcagtgatggagtggtttggtgaggagacaggacacacagttccagtgtaaccagacaggtgaggaggatgagaagggtgtgcaaggtgcagaagaacaggagtgagaggtgtttcctctggggatggaagaagttaatcagggaaaagtgtacagggaaagttacatttgatctgagttttgaaggaggaaaagacacagaccatcactgagtggtaagaagaaggctagctttatcttgagaaggagtttgtaagaaacactgtagggtaaaatgcacgctgcttagtttcattagcaagtgcttattaaacagctactcctgaccttggatggtgtttggagtaaactaatatatataatacagaaatatgtagggatccccatgaacaagaacccaggctagatttaagaagccagagtagtgggggcaaagaatagtgtgactgaaagtaattaaacttaaaaatattttgtcatgggcaggaacaagggagatcattgtggcttgatggaagtgaggagacaggcttacgacctgcgggatggctctgctttgctagctagggctgggatttcaggtcagggaagagcaggggcatgaaggccggaaactgtggacgatgggggaagtgaggacagcagctggaggagcagagcattagtggctgtcacctgctgacccagcccccttttccctgcacctcctctcacctgcctccactcatgttgcagttgtctattggatagcacgtcactccagactcagttacttaaaaaagcggtaaccatttctctctcatgggttctggatcaggaacttgggagcatcctactgggcacttctggcttagcatctgtcatgaggccacagtcgaatggtgggtgggtgttgctgggcatgtggaaggctcttcgtcccatgtctggtgcctacactggacaaagcctcctgctgagcacctctgcctctctctttgtggccgatccacgtggcctcttccgcatccccggctccaaaggcatatgtccggggggagagaaatatgggaggaaggagcaccacctcttctacgtcaccctgaaagtcacacaacatctcctccattgtagtcagaagcccaccagattcaagaggaaagaacttagatcccacctctcaagagggaggtttcagtgtcacaattgaagaagagcgtgtggagtgagatctgttagtgtgggcgtctttgggaaatgccatctgccacagcctcagaggctggaagggctgcctgcatgctttctcagcctctgttgtgggatatcaatgagacataggagaagttggctggagccctgggaaaacttttccacataacaggagcagatgtggcagtctctgtctcatgcttaccctgttgaatgtggctgtcaggccagtagctgcggcagccatcccatgaccacagggagcagctgagggactcagggcagctgtctctgacacctgtgacagccactggagaatgacagcaactgcctacctcgaggctgtttgatggaaaagtaaaactgcttgtctgagacactgttacttgggtttctgttgcttatacctggatgtctttctcattgatctggtatgtgatattacataatatgggataggtgaggtggtaagatttttaaattattgctgtgtaaaagtagttaaaattttaatgggcagtgggaagccattgagatttctgtacagagagcagtccatgtgcttatgaagcacccagcacgcctgccacgtggccagcactgtcttacacacacagtaacatctctgtggctaagtaacttacagtttacttggaaagagaaaaacaggtgagtgataacacccaccacataggtatgattttatatgtgccaggtattatgctacagatgtggcatgaactattgcatttaaaccttaggagtattacatgaggaagacactcttatccccattgcttttataatgaggaaacagatatttagaaaagttgagtagcttgcctaagtttaaaggtaatccattttgtgtaatgcaatgcattaattgtaatgtaaatgtaatttgccctagaattgcagacatttcaaatcttcacttgacaattatttaacacatacattgaggctctaatttgtgctagacactatgctgagtgttgagaatatggagatgagcatgatagggctcctgcctttgaagagccaagtctagcgggtggctgacttctgcgtgaccacatttgggatggaacaagacatttattgagggtctaccacgtactaggactttttttttccttttatttccactgtgctcagagactcaagtactaggaatataatgttttaatgcactgagttaaattttataatggttatatattgtaatatgagaaaccattccaaaacacagtacttaaaacaactgtttatttagctcaggattccgtgggtcagcagttggcctgggctgagctaggcggttcttacactctcagctagactcagttatgtgtctggtcagctgcattcagcaaaacagttcttctctgagggctgataggctctcagctggaatgtcagaggcagctaggccacatgtctctctttgtccagtaggctagcctgggcttgctttcagtctgctgggaaaacacggttctgagacagaagagaagcccattaagttctctgaaggcctaggcttggaactggcacatcctctcttctgcagcattccgttggccaaagtcacaggatgagcccagattcaaaggataaagaaatagccctgacctcttgaaggaaggagctgcaaagtcacattgcaaggcgggaagaagatgaattgtgaccatttttgcaatctgcaaaattgtataccaaattttattataataatgtataccaagcatattaagacttaaaaggaaagaataattttagggtttctatcttgggagcatggtgatattatatataaaaattgagcagttaggatgggggagccagttttttttttttttttttttttggtgggggtgggggtgggagatggaatctcgctctgttgcccagactggagtgcagtggtgtgatctcagctcactgcaacctctcccccacctctccaggttcaagcgattctccagcctcccgagtagctggaattacaggcatgtgccactgtgcccggctgatttttgtatttttagtagagacagggtttcaccatcttggccaggctggtcttgatctcctgacctcaggtgatctgcctgcctccgcctcccaaagtgctgggattacaggcatgcgctaccgcgcctggccaggggagccagttttgaggggaagataaattcagtttggaaatgttgagtttgaggcgacagtaggttatccacatagaagtgaacttgtatttaattgaaaatttggacctggagaagtcagggctcaagagagagcattttggaatcatcttcccagggctggtgggtagattcatgagaatgatgccactttagagcaagaagggcagaaatctaagttttgtgtgggaagcagcctgtccttaggaggtccagagtgaacagagagaccagttaggaggctgctggagccgtctgggagagagtccaggctggcggcataggtgtgatgtgaaactggctggattcgggatgtattctgaaggtagagttgacaggacttaccagtgaatcacagttgaggtgtgagaagactcaaacttcctggtctaatgagttggatgatggagttgccatttactgaggtagttctcctcatatgaacctgtggccagagttgccccaaaagcagtggtagggaagttttctcaagggattgccccaactctcttgaggtagggccagtgaggattccagagaaagaagcactaaacgctagagtgctcagtccagagcagttattaggggacttatggacagagtgctgcagcagttcttgagactggactgatagtaaaaagaggttctacctgggcatgtccacaacgatggggcagagtgtaatgtttcatgacggtttaaagaatgtggctcagggagtgggagctagtttctacgtgtttagccttgtggttgatctttcagtgtttcaagcgataacctcaacaactgtatcagtgcttgggagtattcaagattgcggcttgggttcagacctacagggaaaaatatgcagctgccagagacagagggtccaggtactccatgcttctcgatcaggacaaagaaagaaagtgaggggagggggacctgggagaccctacagtgtttgggacaggcattccagagctctgctttgaacttgtgaagtttgagatccctgtttgacattgaaatggagatggtaagtgggcagtttgacaaagcagtctggagttagggaggagatacaggctgaagattaaaaaccggggcatcagactggatgaagtcacccagtggttgccctagtggatgattagggctgggataggctggtagcagcaggaatagagagtgagaatttcaagagttgtttaaaagaacaatgaaaaggacttggtggtagacttgatttaaggtctgaagggaaaggaggaactaaagatgctgcctaggtccgacaaagagtttgaaaataaaagtggacaagcttcctggtttcatttactttagggtcttgtccacagtttttattttaatattttatacattaaaactgtgatcagttgagatttcagtatactttgaggctctccacaaaggttcagcaagaactacggacagccccttgccggcatccaaactgtacagttccctttgctttggcaataacgtattatgctgaatcaatgtttctcagcccttaaatggcctttctgtgcttagcagccatgtcctcagtagctcagttggttctctctcacaacaactttcaagtaaaacaaaaggctagaagaaatgttcttgacctgggttttgtgtgtactgaagggcagggcaatgtggtaaaggttatttgcatagaaagttggggagattgtgtagacttgggggcttacacagatgactttctatttaataagagcccagatgcaatatgccaggcttcagataaaaagacaggaggccaggcatggtggctcacgcctgtatcccagcactttgggaggttgaggcgggtggattacctgaggtcaggagttcgagaccagcctggccaacacggtgaaaccctgcctctactaaaaatacaaaaattagccaggcatggtggaacacgcctgtagtcccagctactcagaaggctgaggcaagagaattactggaacccaggaggcagaggttgcagtgagccgagaccacgccactgcactccagcctgggcgacagagcaagactctgtctccaaaaaaaaaaaaaaaaaagaagaagaagaagaaagaggtttcaaacagccatctttgcctgaggctcttgtcctgacacggacagtggtggcatgctggttctgccaacttggaaggggagcccttccgagtcccatgatggcatatgtaagttagcaaggcttcctgaaggtgggtgggttgtaatttatttgtacatttggctctgattcttggtgattttgggagaaacgactgcaggcaagaagataggtgctttatggttgtttttttttttaacttaacactgagttttttctctcaaagtagtgtttctttgattctgacttcttctgtgcctccacaaagtaaatacagcaccataatatcatctgagcgtctgttcttgaattctcagtattttggattttagaaggtgtatgctacacataccatagagtatgaaagactccaaacagggctggggcatcaccctgtaatcaaacgtaatatttcagcaaagctcattaaatgggatgattaaaggcttaatagagccttatggcagttcaggacagattttatagccaaatgagtcagctcaagttttgtcatcaaatgaattagtgaaaaacaattggttttcagagatgtttagatttcagaattctggagaattcattatggacccatattccagtcatagggctctgcttttattttcttctcctttgcaggcttgatggtcattagaattgcggattgtgttttagagtgtggaggagaaatgactggctgtgtagggtggattttgcattatgaactatagaagtaaatggctacctagctaagaagaccaattcaggtgtatttattcttcagtaatgacaatagtttcatttatttttctaaaagctcaaattatgaatacatagcttctcttaatgaaacctcaggtaaatgaattttctcttaatcatttgtgtttacttggatttgggaccatcacatttaattgtgtgcaatgcagttgttattgtttttttgttattgttgttgttgttttttccaggtatgtctctcttactagacagtgagctcttttagggagggaacatgctgttttcattatctttgacatctggcataataaacattcatgttgacctgtttctagaaaaagcagccaggagtatggggaggaggtaggtgcattgctttggcttgaggtttggcatgatggtctcccagaggagtcattatgatcacttgtattaaactaactgtcatgagtaaaaccttaagaaacagatttctgggactgcatctgactgaccgactgctctgcgattgggaaaaactgatctgtgtctgtatctgtctattttgttttgggctttatccagggtccctgtgcctgctgacatcatcctttacctccttgagaagtagagggcaaggaatgggttttggtaccctgtgacgttaggaagactttttctcatcgttgtaattgcttcataattgagcgggaaaacaaaccttccaacattatagatatcttcctccaagtggataatgagctgtgtcctctttgcttttttgccatttgccatgctcctccaagcagcagcgagggtgagaaaactttggagtccagcagactggggattgaatccttggcttgcctatttgctagttcattttggtgaaattaccttcaatcactgagtcaggttctcacctttgaaaggatggtgattaatagataaggttgacctcacaggtgtgtagtaaggatgaaatgagataccttaaatcatgtgtctttaaatgaggtactttaaataactcaggggatgagccacttagtaagcctggagaaatggtaatttcctgtctcagctttggtaatctctttgtaagccatgagacttgtagatagttaactctggcatttatttgagaaatttagttgtcattacagcaagggttgacatattaattagagcaatgcccttttcacataactgagtcaaatatcataataaatgccattaatcttggaaagtcgaaaaggagatcctgagaggcgaattagtgctgtgccaaaaatggaatgagaactcaggttcaaggatcaaggtcgcagccaatttagccgtgggtcataagaagcatttgctggagcagtctgacaaattttgttgaacctggcaccagaatgcaacccctcttgccttagaccattctgctgtgcatcctcctcaaagtcccatggccattaagatgcggggcctggacttgaaattcagccttttgacttcagactggggtgcttctcactactgtatgcctccctgctctcacaaagctccacctgcccagtacacattcctagaggtgtcaaggggtgaggagagtaatagttggtaaatgttatgaaatcttacattcagtttctctgctgtaacatgggatgattatatctacttctatggtactgttgtgagaattataatgcaatgataaaagtaaaagtggcacacacaacaattagtgtcacccattttttagctaatactatcaaggtatggatttacatcattcgagttgaggtagttgcctattttcaaagttgtggataactataaggagatgaaccttataaagggaatagaaatgtgcccttaggattctagaatggacagaaaactagcccaccccaggtgagtccacagtgattgggagctggcattaaactggacttgaaagagcttgagggatgcaggagagcgagtcaggccattctcagtgtgaaggctgagcctggctaaaaacctgggccagcttctcggggcacatggtctgtggtcacttgccagctgggcataatgggaggtagtgtggtgactgcagaccaccaaagggaatttgtatttggtctttgcgattaaatgatgactttcagcagggctgattagatggacacacttgttaggctagggatgactgtcttccaggagttgaatgtggcttggataaggttttggaagaaaatgagagtaaagtagttggatttggcaggaagttaatagtacagactttataccaaagagtgtaacattatcccaagactgtggctagaggaggtgaatctatctgtgactgcccagtcaggttggtgggatgggggaaacattagtgaagctctgtgagctctttcttagcctttaattacagtaatattttgtttctttgcaatatagcatctcgaatattccaaatggaaatttctctagcatgtaaagccaattcttttattcatttttattaccataatgtagtatacgttatgacaaggtaatttaatttagaaaatttgactttgtgtaagaaccacatgcctgtttagctttttttttttttcttgagacagagtctcgctctgtgacccaggctggagtgcagtggcactatttcagctcactgcaagctccacctcctgggttcacgccattctcctgcctcagcctcccgagtagctgggactacaggcacccaccaccccacccggctaatttttttgtatttttagtagagacggggtttcactgtgttagccaggatgatcttgatctcctgacctcatgatccaccctcctcagcctcccaaagtgctaggattacaggcgtgagccaccatgcccagccagcatttatttttgtatctttttattagttggcagtggttgatcctttcctgaggccaagtatttgaatttgtttgacaggtgattagccagctgtctaaattgggtttgaggtgacattataaccccaactaggcatgaggagtgactccgtgttagtcagaggcctcagacctgaactcgcccttgctggtaacagctgaaagactctaggagcaagatattcagggacttgtgggacaaggagattgttggttcagaggatagtgtgaagggcttatctcataaatatctggattggctgtaacacaaagtgactgcaaaatcaaatgatctgcttggaaaacttcccagaggtagctttagaagttccaaagaaatgtcagattctatctcccaatcccaaagtcgggcttttaattaagttaagagttagtcgactaaggcaaatgacctgatgcttttatctggaaagaagttatcctcgcccacgtcagtgtgttgatgccgtgaatgtaggttcccgttactgagtataccattcagtaattaccaagaaaaatagaaagagtgcatggtcacctattggctttctccctccacactcaccgaaagtaccatcttgataaaaatatcaaaatatcaggagcttatgataacagtttattacaagtaaaacattcaaagactcatcttgctgactttcttttacatctggctactattatgtataatttctctgcagtcagggcatccagcgtggtgccctttagttaggttgtaccatagatgatagtccacagagaagcattttggtcccaataagcagcattttgtggcagaaagagctctggagtcagcagactctggctgcacatcctggctttcaggcgaataaatgcgtcacctttgtcaggctactctttgaacctcagattcttcggtgaagtggtgatactatctgtgtcaaggggttgtgaggattcaaccagtattatatgcagtatgtacatatgtacacatataattatatacatattatatataaaatataattatacatgtacaatatatacaaatatacatgttttatatacatataatttattacagtgtgtggtatgtaagtttcctgggttttttttttttaagttccttataacttttaccctctcttctccaaaatagtcttgccatcagatatgatgacatgcagctcagcttatgtcaggaaaagtctacaaatgtggaatatcttttttttttttttttttttgagaaaaagtctcactttgtcacccaggctggagcacagtagtgtgatcatagtgcactgcggccttgaactcctaagctcaagcaatcctcctgcatccgcctcctgaataactgggactacaagtgtgcaccaccacacccagataatttttaaattttttgtagagacagggtctcactttgttgctcaggctgatcttgaactcttggactcaagtgatcctcatacctcagcctcccaaagtgctatgattacaagtgtgagccactatgccttgccacatcatataatatcttgattttaaagactgcaattggctagctgagatactcaccctaaattttttttatttaaacctattcataactctcagatcagactcctattaattatatgttttattacaaatttcaggtaaggttggtttctgaattagaataataaatttgaaatttcagtactgaaaccttaataaaggggtcattactcaaaatttaacaagtaaagccatattaatttaaaataatttggaggacatccagtctttcatggtgacaaaatgaaatttatagagtactaatagatatatactgtagccctgtttcaaagaataaaacttgcataaggtgctaatagaggcaatgtaataaattttctttttactccttactatatatctattttttttacaaaataatgttataattgtaactgttatatgtaagaaagactctttaattccttgactgtaatttaatatagtcacagaattcagatcagattttccttaactagaaaggcagtataccatagtgtttaagtacagaggcataaaacagactgcctggattagaaatatgactttaccacttgctagctgaacaactttagctaagttactaaacctctctgttttctctatttgtaaaatggggacaataatagcttctatctcataaggtaattgtgagaactgaatgaattcatgcctgggaagttgttagaatgtctatctagtacacagtgttagctgtttctagaactttgaaaattgtcagagaattagtatattttctgtttatttctgtcaaagcgattgacagaaatgaacaggtgagaaaaattaggataaagtagtaaaaatgaaaaaacataaaaatagatgataaaattgggggggaaactgcataccatgcagttgagagagtgggtaagtgtgtgggcccacagtgctgctccccagtcctcagaaaagagaagctgtggcccagggaccacagcagcactgtaagtgtgatggctgtttttatagatctgtcaattaaagctctcaatacaagcttcttgtattaatgtcaaagtgcagatctaaacttgagacccctgctggtcaggaacatccaaactggtagaggccttaagtattagatgacgatctgtcagtcccgtatatctatcttaaaatttcatgacgttctgcaacacaacatgctgtaataaatgtcctaatttgaggaaattgggactgtacagtggctgattaatctaaaaaaaaggaagaaaaattgattataataggaaatcattttaaaataatgcataaacaccttatacgttttactttaacttaaagcataatttaagtagcagcctgatcagtaaatagttttttcttatgctgacttcatggataccatggtgtgttttccatcatccaaggcatgttctacttgctgtaaaacatgacactgccaatattttactaaaggttctcatgggatttcaggttgtctttttttgcatgtgcgtgcacacacacatacattgtggcttcttttttttcttaacttaaagctaattcacattatgcaattcagctgtgtcaagtttttgtgtacaatttaaatggttacaactgtttctgatgagcaagactctaaagccacctggaaatggaagctaagtagtgtgcactgcctcttaagattattatctctaattttttacatttcctctcttaattcaagtgaaacctttttagtgacttgccttcaatgagtctttgcaaatttaacttagttttcatagctaaattcatatttgtgaaagtaagtgtaactcagacttctccaacaagtgaattctaattgcaaataagacagtagaacagctaatcagttctactgtcttatttagtacatattaacatagttactgagagagaagtgtgctttaagagattcaagtatctaaaatggtttagccagagtaatctcatctttttctattttatttttattttagcagattgccaggctctaattcatatagcacaagaaagtaatttctatgcttaactagcaaataattaaccatgtaattttgtttctatagaagattggtaataaaattgaacttacatacattgtttaaagaaaaataatctgctcgtttttctttttttttttttttttttttttttgagacggagtctcactctgtcgcccaggctggagtgcagtggggtgatctcaacacactgcaagctccacctcccgggttcacaccattctcctgcctcagcttcctgagtagctgagactagaggcgcccatcacaacgcccggctaattttttgtagttttagtagagatggggtttcaccgtgttagccaggatggtcttgatctcctgacctcgtgatccacctgctttggcctcccaaagtgctgggattacaggcgtgagccaccgtgcccggcctaataatctgctcattttctaatggaaaaaaaaaaaaaaatgcctgcatcataggtatcctgcacaggtatagttatattattgtttaacaaatcacttgaaaaataaacttactgtttaaaaatataactttttgaagacatcaaagtaagttaaccttaaattatggccaattagtggcataattgaaatctcacaaaagaaggatatgacacagaccagagtggatcccagtgtgtccctgggttctgcagaagcactctgtggtgacagcagaggtggcacctcccaccacgggtagctgccatggtggacacagtgatttactgttgttagtctgtcgaggtttcatttctctctgattccttgtctgagttttgaaaatgactgtcccaactcaatgtgatgtggtgtactgatttatagtggaactacaaaccagaataaacaacagtttcataattttgccaggtatatgtttttgcttaaagtatcttgataggcaaaggatttaattttatcacaaaatttataaaaggcaccaggtatggtggctcatgcctgtaatcccagcactttgggaggctgaggcagatggattgcttaagctcaggagtttgagaccaccctgggaaacatgggtgaaaccccttctctacaaaaaatacaaaaattagccaggcatggtggtatgcaccttatgttcccagctacttgggaggctgaagtggtaggactgcttgagcctgggaggtggatgttgcagtgagccgagattgcatcactgcactccacatcctgggtgacagagtaagactttctctctctctctcaaaacaaacaaacaaacaagaattcataaaaggcaacttttccctgagacaaaagtgagacagcatactttttttttaatcatatacgtttaaaatttgtattttgatgtggagatcaatagaagtggatttcaggattttgtacaatttttttctaaggttttaattaatttattgcaaaatgctgtgaaagggcatatgaatcatgtggtgtgcctttttcctttgagctggcaaagagggcttttgacacagctcctgtgttctcattgtggacttggcccagtcattcctcccagacatcatttgcagagagaccctttggtttgaggttagaatatctattgtaaagtaaagcctggttaatcaaatttatgtcatatgagccagcagttatgctaggtagttttatttgatggcgggtggatcacctgaggtcaggagttcaagaccagcctggctaacatggtgaaaccctatctctactaaaaatataaaagttagccgggtgtgggttcaagtgattctcctgccaggaggcggaggttgcagtgagctgagattgcaccactgcactccagcctggacgacagagtgagactccgtctcaaaaaaaaaaaaaaaatttaaattacgtaagtcatttatgtgcacagtgagaaagtcaaaggataaaaaagtatataaaatgatataacttctctagtatccaaagaatcaaccattaacagtttggtattctctatgaactattttgcacatataaaaatgggcagaaaacacaattatgtacataaatgtatccagctttttaaaaaaatgaaactgaatcatagtatatctggtctgtagcttgcttttttacctctacctaattgtatgcgaactactttctttgcagatcttaaaaaaaaaaaagaaaaagagtgttattcagatgaatggatatatcattatttaattattcagccatatattgatagatatttacaacgttttgtttttagtgatttgttagcatcttcgaattaaaaaagaaaaactggattccaatttgtaactagaagtattttcagaggccatttatagagcgtggtccatacaagagtctcctagataaggaagttattactttgctcaacagataggacaagcaaatcacaacaggaaaaggagtgaacaatgctaagatcgaacgaagcctgtgtaccaaataattgaagagtcatatgacgtgaaggagaaaagcactcttcagtggtgtcatggaaattgaagtctcaagaacaaagaattttactcaatgaacatatttgcttattttgcatgggccctatgtttgttttaaaataggaataaaggccaggcacagtggctcacgcctgtaatcccaacactttgggccgccaaggtgggagcatagcttgaggccagcctggacagcatagtaagactctgtctctataaaaagtaaaaaaattagatgtgggggtctgaacctgtagtctggaaggctgaggcgggagaattgcttgagcccaagggtttgaggctgcactgagctatgattgccactgcacttcagcctgggcaacagagtgagactccaactctaaaaaataataataataagatgaaaatgaagaaataaaatgaaaacatttgaaataatagtcgaatgacacaactttaatgtcataaggatttctttcttatacagtgtagtgtttggggggcaggtaagggatgggtgttatttatttccttttgtaaaatttcaaataaaagccataaggaaatactttatgaagtggagtagcatgtgtgtatcttgaaaaactgaataaccagccattgtatatagcaaagtcattagctgttcttgtcttttgttttaataattgtatgtgtagagtgcatcgtgtcacccagggcaaaggcagggagccatgacttaggccagttcattgttaaccatggtttattgtcaactgtagtgtatgagggtgctcttagtgaattcaaacctacaaaggcaaagttggtgactaatttttaaagtatttttctcttagcagtgacatttttcactaagacaaaatttaaaatagactgggcagtctgagtggcaggggctttcaaatgacgtttcatacctagtgtcataaacatggaatccctcaattaaggagaatgaattgtgaatagggacgggctactttggtacatgccacctgtttgcttactgctgtatttgaagacagaagttttatcatgtctttgctagcatcagatatggctgttatatcttacaataactttgtgttgttattgtcattcattttacttatggagagccacctaatgttacctctagtggctaagcatgctttcctctgagatgtaaggaagccacaccagagctggtcttttctgctttgctcacttcttttttcttagtgcctggaatgtggcaggcacttagtaaataatgttaaatgttatgaagtatattagtccattttcacgctgttaaatgaatgaaatgtattagttcattttcatgctgctgaaaacgaaagacataccctagactgggcagtttacaaaagaaaggtttaatggacttaccattccacatggctagggaggcctcacaatcacagcagaaggcaaggaggagcaagtcatgtcttacatggatggcagcaagcaaagagagagagcttgtgcaggggaactaatctttttaaaaccatcagatctcatgagacttattcactatcacgacaacagcatgggaaagaagtgcccccatgattctgcccccatgattctgttacctcccactaggtccctcccacaacacgtgggaattcaagatgagatttgggtggagacacagccaaaccacatcatgaagtaacagaatatttgcctacctgtagcttatgcaaataggaatttgaatcacataataggaagcccagaggcaggtggctgctaccatttgtcataagctcaaggcagcatctctgattctcccggcttttttctcataatcacaagatgactgccatagctcgaccatagtgttaaaggcaggagaaagcaggatagggtggtgtcagcagatatctgctcacatctcaggggccagcctcaggtcacacagctgatgctgactacaaggggtggaaatcagcagaggcagacgaaggggattttgaggggactatggcggctgagtggtgaagcattttgggattgaatgctgggtacaccgccaccttcctacactgccactgtacctattgtttaaatttgtatttctttttttttttttttttttttttttgagatggagtctcgctccattgccaggctggagtgcagtggcgtgatctcggcttgctgcaacctccaccttctgggttcaagcgattctcctgcctcagcctcctgaatagctaggattacaggcactccagcctgggtgacagagtgagactctgtctgtatttaaaaaaaaaaaaaaaatcaacaacaagtgagttacttccaagatacagtgggggtacatttattgggtaaatgctcttgatccaaatgggaaaaattggccaaaacaaaggggctacaggccccatgcaagactgaaacccagcagaacagccattaaatcttaaagctccaaaataatctcctttgactccatgtctcatatccagggcatgctgatgcaagaggtgggctcccaaggctttgggcaggtctgcccctgtggctctgtagggtacagcccccatggctgctttcatggactggtgttgagtgtctgtggctttttcaggtacatggtacaagctgtcggtggacctaccattctggggtctagaggatggtggccctcttctcacagcttcaccaggcagtgccccagtggggactctgtgtgggctccaaccccacatttcccctcacattgccttagtaaaggttctccataagggctccactcctgcagcagacttctccctggacatccaggcatttccatacatcctctgaaatctaggcagaggtttccagacctcaactattgccttctgtgcacccataggcccaacatcatatagaagctactgaggctttgggcttgttccctctgaagcaacagcctgagctgtaccttggccccttttagctacaactggagctagagcggctgggacacagggtgccatgtcgtaaggctgcacagagcagcagggaccctgggcccagcccactaattcattttttcttcctaggcctccagagctgtgataggacgggctgcagggaaaatatctgaaatgacctggagacattttccccatcgtcttggcgattaacattcagctcctctttacttatgcaaatttctatagctggcagcttgaatttctccccagaaaatgggtttttcctttctaccacatggccagactgcaatttttccaaacttttatgctctgcttcccttttaaacataagttccattttcagaccatctttttatgaacacatatgacttcatgctgttaggagcagccaggctacatcttgactgctttgctgcttagaaatttcttctggcagataccctaatcatctctctcaagttcaaagttccacagttccctagagcagaggcacaatgcctccagtctctttgctaaagcatagcaagagttacctttgctccatttcccagtaagttcttcatctccatctgagacaacctcagcctggattttattgtcggtatcactatcagcattttggttaaaactgttgagcaagtctctaggaagttccaaactttcccacaatcctcctgtcttctgagccctccaaactgttctaacctttgcctattacccagtttcgaagtcgcttccacattttcaggtatcttcatagcaatgccccactcctggtaccgattttctgtattacttccattgttatactgctataaagaactacctgcatggctgggcgcggtggctcacacctgtaatcccagcactttggaaggctgaggcgggcagatcacgaagtcaggagatcgagaccatcctggctaacatggtgaaaccctgtctctactaaaaatacaaaaaaaaaattagccggacgtggtggcgggcgcctgtagtcccagctgcttgggaggctgaggcaggagaatggcgtgaacccgggaggcggagcttgcagtgaacccagattgtgctactgcactccagcctgggcaactgagcaaggctctgtctcaaaaaaaaaaaaaaaaaaaaaaaaaaaaggaactacctgaggcagggtaatttatgaagaaaagagatttaattgcctcacaattccacaggcttaataggaaggatgactgggaggcctcaggatacttgaaatcatgcagttggaaggcaaaggggaaggaaggttcttcacatggtggtagaagagagagacccaagcaggaagtgccacacacttttaaatcatcagatctcgtgagaactcactgtcatgggaacagcaagagggaaatccgcccccatgatccagtcacctcccaccaggtccctcctccaatttgacatgagatttgggcggggacacaaatccaaatcatatcaggggattacatttcatcatgagttttggaggggacaaatattcaaaccataccatcccatgtttccctgggttgatctgtaaaatttcagcagtgattccagtggctcactccttggaacagtcactgtcagtagaagtatggaagacctggccgggcacggtggctcatgcctgtaatcccagcactttgggaggctgaggcaggcggatcacctaaggtcgggagtttgagaccagcctgaccagcatggagaaaccccatctctactaaaaatacaaaaattagctgggcatggtggtacttgcctgtaatcccagctactcaggaggctgaggcaggagaatcgcttgaacctgggaggcggaggttgtggtgagctgagagcgtgccatttcactccagcctgggcaacaagagcaaaactctgtctaaaaaaaaaaaaaaaaggaagacctgattggctggcctgagtcatagtcctccatgtagctggctggccctgaggtaaagtgatgggcggggggggggtcatggcagaagcacctgggatggactaggggtcactgtttctgttgtggaagccaagagtgggaacatgtggaaacaacgagtgtctaccacagacctaaatttatgcagttctagttgagcctgtttttctttgatttttttttttccgttgcctcaaagtttagaagtctgtcatttttcaaagatgtactacaattctgttttatgctggattttgctatggtttggtatttttatacgttgcacagtcctcctagagttaatatgaaatacgatgtcgagtgagttagtgtaatgctaagggccatgagctcttgacccagattgcctggctccaccatttaacagctgtgattatgaaattttcctgtgcctcagttttctcagtgctaaaagtagggaaaatagttcctgctattttgaataatcttcgtagttcaatgagaaaatatatgcaataatgttagtagagaaccaagcagagtgtttgtacctagtaaatattagctgccattattattattgttgttctttgtatttcctctccccaacctctattctctcatgtcgagggcagaacccaggttggctcttcttttttgtcctgctctctttgtcagcttgtcacttgcattctctcggctagtatcacccttgcgtaaaagcaattcagtcaggcaatgaagaaatatttacacagagcttaaaccgtgcgtgttttctttgaggcagtggtccattttatcaaatcaaataagtaacataatcaacttttggtttccttacctcaggtgcagtactttaagaaggtagtgtggaggaaataatatatatacaaggaattaattagtatgaagttgatcctcagaaaatataccaaatggacagaatttaatgtagcattctctaatttttatgtaattacatatatgaaagcatataaataatatatatttttaaagtgtaaaatgcataaaaagaaggtaaaactccatcataaccccacttcctagaaataaccagtgtttacagattgatgtctcttaggctgctttctatacagatacatacacattgtaatataacttaagatatttcatttaaatagtcacaaggaggaaaggtttaacttccctaaagaaatgtatgtactttccccccaagttctggcactcggaatcccgagaaatcggtggaggctattctgtgtaatctgatgagagtgcagctggaagaggcgggctgcgtggttttacatgacattaactagggatgtggggaagtggatcatgatgagattgaatagctgatgcagttatggaaggtgagaaggtttgctcagcaggagagagattttcaatagtaaggtgaattttaggcagaaacagacaaccaggtagtgagcaaccagagggaatccatgggaaatggccctggaagaccaccaccagcaagtgtctgtccatctgacagcagtttatggaaactcccttgagtgaggggcaagggtcagtcctggccagggtcacaggtacctgctggaatctgggatggaagcatgtggtcacttgtgctgttactctgacttgtctagttctcccctatccaggcacaggataccatcacacttctcctttcctgtcaggttagatgtttttagctaattggccttgtccaatagagtatgcgtggagaccttgtaaatctctgcctgagtgtccattctccctcttcctggtactgcagaagaggtactagagcaagtctgtccaacctgtgggcctcatgcagcccaacacaaattcgtaaactttcttaaaacattgagttttttttgcaattttttttttttaggtcatcagctattgttaggtgttttgtttgtttgtttgtttgttttttgtcatcagctattgtttttgatgtgtggcccaagacaattcttcttccagtgtggcccagggaaaccaaaagattggacacccctgtactaaaggctctcccactcatgtgcctgagtgaagatagtgtagaacagagcctcagccggcccacgtggccgtgaagcatgattaaaaaataagccttggctattttaagccagtgagatctggggcattgtttgtcattgcagcaaaacatagcctcttcgtgattgatagtggtgtcatcctttagcctcaaccctgcaaaaccaatttacctgttcctggggctggtatgagttacaggtgagctgggccaaggtgaaattctgatgtagcttctgtagattggcaatcttaagctcctacctaattgaaaatagtaggtttattttggtatataaaatatattaatggcctcctattttttcatatattatggaaatttgaaagtaaaaaggctgaaaacaggatagatacagatgttttgtaaggcagtgaggacagcaccataaaacaataggtctgtgctgggcctttctcccatagacactagcagtgcagggctgatgcctcaggtacctggtgcccccagcataccagccataggccttttgcctctttcagcgggtactgtggctgatacttttggaacccacagtcattagtctatctgtgtactataaatcccctagtacatacaaggtgtgggaagagatttagcagttctccaaaccaagctaccaaccagagcaagcaggctcctgttggctagttcacaatgtcccccctttccccctcctcctcacccacccactgtgatctctggagtaagctccagccctcacccagttcactacccttaaggagtgagccctatgaggaaggagcatgggcacttactctgtccactggggttttgaaggcctccacctcacgatgaagtcagaggatgcttctgtttagcactggcctgcattgctgcaaatgccagcctttcccttcttactaatttttaaaaaagactttctgaggtggaggaggtggtcataggagacagcagcttagtataattagttaaggtggaaaggcaatttgtacaaaattcaattgttcttctgtaagaaccaccactatagattcaataaaactgttttccattaatagaattttcttatctttaaatgccttgacaaaattacaaaaccaatgtgacctctcagtgtactggtatttgctttgttttggtaaaatgactttgccactccctaagtgacaagccagtgtattagtctgaggtgcgggttatttttctcttagagttgtcagacattttctgagggagaaagagcctggatttgtgtgtgtatgtgtgtgaacgttgtgtggatacaggtgtatgcaactgccagtaacttccttttacagggattgatgttttcacttataaaatagatgcttttctctgcctcagttttgcagctatatagattaaatcctaatgtagtgaggagtctgaagattggtagtttattttaggacttttgaagtaatagaaaaaagggcagaggcaagaattgttgtttctaggcagtgaatgaccttatgggcttatcttgctaacccttggcagttttcatctcacttgtttttacagatgctgaacagctaatccagtgacctgaggaaggaagcacttgccattcatcctcagctgagttctgtttcagcattttacatgatgttacagccaatgatttggacttttagttctcctttagttcattgccttgaaaacttcaatgtgtatgtgaaatacctgttcacatgcaggtcctgattcactggaactggagtagagcctgaagttctgcattttaacaagctcgcaggtgctgctgctagtccaaggaccacacttgagttagaatcagtgaagtgtacttactggtggtggtaaatgctggcctcagaccatactgcctgagagcatatttcaagtccagctgctgggagatcaggcacttcatatatgtgtacctttacgtaaaaaataatcatacataacgcttattgaatctttctgtgtgccagacagtttttgttttatttctcacaacctctctatttgtgggtgagacttgctcaaagtcccaagttagtagttccgcagccagaattcatacacatttgtctgacatcagaccccatccttggaactcttacactgtactcaaagttctttagcattcatgtggattttgacgaaagaacactctaaaagagcttgagaactttacttctctctgcctccaacttcccagtcacccatgacactcaggtaattctaacttagctgttgagatcccagtgttcaggcaagagaaggtgctagctaccattgtaggctgttgtctaattgtctgttttgcctcagaattgcataacacaaatcacatttaaccagataaagtgtttactaataaacttggaattaactgtgtgatcagtttattgagatttaccattttgataaagtttaccaaattgaaaaaacattttctgtaaattgtttaaaaatttactgaagtgcattattgtaaaggtatttttatacattggcatgatttataggcttttcttgaataagtacctgtcggttaaaaaaagttgaacaggcaccccaataaatgccatatttatatgttatatactactgtgccaataaaagtatatacattacagtcaacccaaaagaaattgtgaaagcatgagatgtcagtgaagtacagtatttttaatgtcttgtcaatcagatggattcattctattatacagtaacatctcaaggtgtagtgtgtgtgtgtagatccgtatctaaaatggtcatcttggtcatttctttcttgataattttatttttttggccaatgtcttgtcagatctgatcagatcatctttgcatttactccatatatggctggtgaagaatccattctgggagtagaaaaaatgtcacctctgccattttcttgtttttgcttatgcttaatttgttttattttcactctttggttttttggcagtgatgttttaaaactacttgttcatttcctgcagttagttgagctagattcacaactcagacgcacacctacctgggtggatgtgtgcaacagagctcagtaagctagccgaggtgtgtgttatagatggtgcctggcccctgtgtacctgcctgaggtagggaaaccaaacattatacagtacaatgtactgtataatgtgaaagaatgatatttcagttcttagcagagaaccgttgatacaggtgttctaggctatgtactcaagtaagtaagcagaaaatagcttttctggattaagaagataaaacctgcaggtatttccaggttggccgccttttatgtttgtttgggttttttgttgttgttgttgttgttgttgttgttgttgttttgttgttttgagacaggttctcttgtacctgggctgtagtgaagtggcatgatcacggctcactgcagcctggacatcatgagctcaagtcatcctcccacctcagcctcccaagtagctgggattacaggcacgcaccaccatgcccaactaattttggtattttttgtagagacggggtttcaccgtgttgcccaggctggtctcgaactcctgggctcaagcgagctgtcagcctcggcctcccaaagtggtagaattacaggcatgagccaccgcacctggccagccctcttttatgaagctgtttttccctggcaactaacaagaactgtataaaacatagtgcatatgtgtgcacgcagtttgcttttatctgtggaacatattgtgtgtcagaagtgtgaagtgacccacaactcaagaagtaaaatgtgaatgttagacaatagttagtgatgaaaaatggagttgtgccgagcctctttcatctggaagcactgcagaaaacccgtgcagagtcaagctgtgggcccagggtgtggtcaagccgttctaagcatgtggcaggtagagtcagctctggacatgaaggagctcatctccgtctgtagtgcatctgagcactggctctgcattcatttcctctcaggtgctagtgttgtgactagctctgtacttttggaattgctctctagtagatggatacaacacctcctcactttttttttttcattttaaaaaatatataggacttctttataattttgagtgatcattggtttttgtaagagtgtttccatctgtatctcaatatggttgaaaattaaacagtcaaaaccagtgtggtattctagactgatgttttggattctgaatgttggcactagctctacaaataagtgctggaaaggtcttagacaaaacttcggtgtatatttttctgtatgcaaaatgcctcctgatttatgagaaagttgtgaaggtttccatggatattatgaggacaagttaaataaaattcttttgagctgctttgagcttctcagaagtctaaaagaaaaccaaaaaacaaaacattgcctaaacctagctcttcctttactcaccatagggagcttttcctgtcctggcatcccatgcccccacaccctactcccaccccttccccacccctcagttacccttcagctttgtcatattcccagtgtggcaacactggactgcaactttcagtatctccagtgcctggcacaaggttaatgctcagctgttatctgaattagagtttagagaggatgtggatggagtcacagattggtttttcttttaattcaattgggagatagtgttgactgtcattactgttacaaaattatttgtatgaattgagggaagtgcagactgtctgagaaaacaaatgaagactggtgttctgaatagagaatcatactcaaaattaactggactttctcacttcccaattaaagggggtaagatgccagcattttagacattattgttggaatatctttgataactcaaaaacattgtacattttgttgtagatcagttttttaaagacatgtttatttggaagataatgccatattaaaggtctgaactaagctgttagctttcaagccttaagtttagaaagtatacagtgtacattttgaaatggcagttgattttgtaaaaggtcttcaggttatttttgtagctatatccaaaaataaatgatgactattggagttattagaaagcaaattatctctgtgccagaatgctggctttgggagtttttttttttttttttttgacaacttatgttgggagaataacaaccgataacagcacacaataaacatctcaatgatttgttttgtgtttacttaaaacaagtttatatatttatagtcttgttctcaagtggctgacatgaacagtaaaagtgatactggaaaacttgtgggaatgaatatccatcaattgccggaacgctgatggttaactggaaatttaagtcattaaaaatcttcccagtggtttgctgtgcactacttgagctagaccagctttctgcagcccacctcatccactgagctcccgagctctgcttgaaagcaggtgaggaccctagctcattccctacttggtcttccattctactgttccccttcccaagctgcagtctgtcctaccaggataagttccttgtggtggccctttttctacagtgagtgtctccagggacactttttctttttgagacggagtttcgctcttgttgcccaggctggagtgcaatggcgtgatcttggctcaccacaacctccgcctctcgggttcaagcgattctcctgccttagcgtcccgagtagctgggattacaggcatgcgcccctatgcccggctaatttttgtatttttagtagagacggggtttctccatgttggtcaggctggtcttgaactcctgacctcaggtgatccgcccgcctcggcctcccaaaaagtagaaggagctgtttccgcccggttttgaaccggggacatttcgcgtgttaggcaaacttgataattactacgctatggaaaccctgggacatttctaattagccctgcttaactagtattttaatttgggcgtctcattgctcaggtatgttccttttgccttagtcacctagatatcttgtagtcagtcagctagttcaggtttctagctaaaacaacaacaactcttctcattagaattcacttgtgtgcgtgtgtggcgtctttacatgtaaacttaggaactgcatctaggtttgagtggttggtgccactaccatgtggctatgggatgttggacaaaacacctaacctccctaagtctcagtttcctattttggaagataagaatggcaacatttgcatcatatggtagttgggagaatcaaaagctcttacccaccacactctcctaatgtctgatgtggaaatgtcagtctccactcatgctccggctctcttcagtttgctggaacctttcttatggtgagttcattgtacttttaggatattggatgtccttgaagaccagaatgtctactgcaatacagatcagctttcatttagatttttcttcctagcagcatctcctgtggtgttaaaagatcctgacttctgcagaaagatggtagaaagttccatagccctttcataagtattgagtgatagtttctaaccatacctgcttcttaggtttgaagtgttccatggagatgcttggaagatgttaggccagggatctctttggtgtatgttacattttttctgtaacatataaaataaaacccttaagaataatgtattgaggatatgtacatgtataattaaggtataaaaatgcctgtgaattggccaggtgcggtggctcaggcctgtaatcccagcactttgggaggccaaggcgggtggatcacaaggtcacgagtttgagaccagcctgaccaacatggtgaaaccccgtctctactaaaaattcaaaaattagccaggcgtggtggtgcacgcctgtaatcccagctactcaggaggctgaggcaggagaattgcttgaatccaggaggtggaggttgcagcaagccgagattgcaccactgcactccagcctgagcgacagaggagactctgtctcaaaaaaaaaaaaaaaaaaaatgcctgtgaattaaaaacatgaaatatccataaggtcatttttttcctcagacaagaaaagattgaggtctgagaggaatacagagggctctggatagtactggtgatattttaagccgaatgagaacatttcatagtaaatttttctttaaactgttatatatgtcataaatattgcctaagatttttaagttaaaaaaaaagtctatggagagagtttaaccttctttcagcttcacttacctgaaacaaggtaatagtcatggcagtacctccttctaagatgtttgtggagctaaaataagctatgtaaaataatgtatgtaaaaatgacttaaacttattgttgctgaaatacattgtttaaattcactgtctaacaagatagttttttcagacgtatgagaagatggaagtaaaatatggtcattgtgggaaaatcagaaaataaggaaaagtttaaaaatcatttataacacacctgttggggtgatcagacccaacaccaggtcgtgggggtgacgaagtccagcggagtcaaaggaattagaaaagacagtttgagagagaaagtgggtccagggggccatcgctagtgtgtagaggctgcgaaggccccgagctctgggagcccagactatttattggtgatcaaacaggtgttgagaatgtgggggtcaaaagggcaccgttgcattaagcacatgatttacagctgtgacggtttagcatatgctctgctacttgagataatggagagcaggttcttttaactcaagatacaatcgatcctgggagagcaaggagcaaggagcaaggagccagcaagtctagacacattccagagccacgagccctggattctatccaagccacaaggggtttttatgccctgggctgagattatggtgcgtcagggtagccttccaccctttagcacagagcttggcgttccaaaggccacaaggagttttagaccctggatcccggacatgttccaagaatcttttacattatgtcagacgtacaagccttgcctcggcgtctcccaacacacaccaccaggaacgtcttagtttatttctctttagtgtgattttattttctttcctcagaaccagaactaattgatacagttgttttctaggacatttttgcattgtagaagtatgacagcaagaacacatgcttaaaaagcaaagaatgaagtggctcctctgagtgttccaccaggtgctccttgggcaggcgtctctcccctctttgtgtcctccctgaatgcacctgtttggtgcttcctgaatactcattggctgagtgattgacggccacaggtgacagcttggttaacaggtgctctgaacaagagagagaagacagagcctcttggaccctgacctaaccttgaacttgctttgtgaccttaggaaagcttattcacctcattagcctacctttcctcatctgtgagccagagcactaaacatttatgtttagagctaaacagatgtctgttttagctctaaattaactattaatactaataactactagatacaccaagggtatttagttgagagtgagtgaaaagaagtgatgaggaaaaatgtgaatttcacaagttttcaaagtgatttgcaacctcaatgaatagtgcatgtgattgaacatactttccagtagaatttttactcaggagtttgcagctatgatgagtggaaaagaatagaagttagagtcatagggggtactattccacaggattttgaggcagatgaatgcctgaatatggtcaaaagatgaaagtattaactgttgggtttcctccagaccgtaattataatgtagctcttcagcattgttttatcttgctttaatggaagaatcttgctgccacttaatagatgagaagcatggaatggtagtttcgcattcatatcagatttggtgtggagttcactttttcctaattcaggcctggctaataatataaactctatccaataagaagatatattattttctgacaaaaaagtttggaaaatacaggaaggaatgtgtaactgtgtttcctggtacatgtcctaaggaagctgggactagaaggtcaccccccagcacatgcaggttcagaactggttagaggcacggcggtccccagattccagggctttgaccacagatctgttttctgagttcctgtattatctctaggccatttcattcacagattcttgccaaccaactgagattaactgaattgtgtttgaatgagaactggatttgtgaacattcaaatgacagaaataaatttggctatctgaaagtaaaatctaaagttttcttcacatgtagttagtgtttcagagggcttaagagaaactcagtaatagtaaagactacccaactaaaaatgggcaaagaatctgaatagacatttctcaaaaaacacacaaatggccaccaagcacatgagaagatgctccgcatcattaaccatcagggaaacacaaatcaaactgctgcacactcaccagggtggctgtcattttttagaagacaggcaatagcaagtattagaatttggagaaactgggaacctcagccattgctagtggggatgtaagttggtgcatcattttggaaaccagtcctgtagttcctcaaaaagttgaacatagaattatcatttgacccagcaactccactcctaggtatagacccaagaaaaatgaaacatgtttatacaaaaaaaaaacttgcacacaaaagttcatagcagtattcataatagctaaaagttgatgaacagatcaacaaaatgtggtctctcaatacaatggaatgttactgggctatatttaaaaggtaaacactgatacatggtacaacatggataaaccctgaaaacatgctaagagaaggaagccggtcacaaaagagaacatatcgtatgattccttttatatgaaatgtccagagtaggcaaatctgtaacaacagagaattggttgcttagggctggagggaaatattgtggggttggttggtggtagctaaaaagtacagggctttgagggttgaggtagatgttctaaaacatattgtaaaggttgtacaactctgtgaatatactaataaccattgcattgtacactgacaatgggtgaattacatatgtgaattttgtcccaataaagctgttatccaaccccttatcatttgaatcagttttaacatcttactcttgagagagagagagggaacagataacggttaatcatctttcaagaatagtttaatagaacaaaagctacaaagttctcagtctggtgtggaacatttgtgtgacggagcgcagtgtaccgtatgggccgggactgtgcagaaggtgctgcacgcagagcaagcgggagtgcttggaacttcagggaaggctttactcaccaggcggcaaggggcagaagggtgttcctggccaagggtggcacgaagcatgtggtgatgttgctttttaagttacagagttgggtaaggggtgcaagtggtgggagacaggtctggaaagggagattacctttcaaaacatttatcttttattaaagaggaaactgtatatgtaaatactgtgctgaagcagtctttatcttctggagttttgagtttgtgaattaataacacagagctctcatttgctgaatgtttgcggtgtgcctggccccggtctgaggtcctttcttaagatactcctcacaactccgtgaggggtgtgctaccatggcttgcgtcaagcagacgaggaaaggggcagcaagagggtcctggtggccacagctgtgcagctggtgagtgaatgacgaggcccggagtcagagccaggcagccagactccagagcccgccttcctcaccactgacctcccggtgacatctctgggggcagcagtctgcagaaccattgttctagttgaatttcttccagcctccttttcagggtgcttttggttcgttaaaatgaccacatgtgtctacaattaaattggcaatcactttgtttttcttgcacaattgtagttgttgctggttcacttaataaattgcagaataagaagaacagagtggtgataatcacagggatttcttccttgagctgtgtgtatttagtgttcattcaaattacatttgttttaggttgagagaaatccttctgaatagtgatgacattggttgttccctgagatggcttcttgtgtaaatctatcaacaccctttggagggctcctgactcagaagatgaacgtccttgggatgggcaaagtgatgcttgttttgccttccctaaaagtagttctaggtgtaagaagtgatgtgactgacttagggccttagattatggcccaaatgtaggctttctgcagttctgccctatgtttttttgtgtagattttcctgcctttaataacttcactgataatagtaacactctaaaatgagagaacatgtcttatattggagagggtaataggttggtatctttttgaaccatcaaaggcctaggtcaaaactaaccctttcctctgacttcttagtcaaagaacatacactttagctaataccccaagacagaagttctttggtgctgagagtcaacgagagtcacattctccttgaaaagggaagggaagctctatacctggataactgcgcagatccatggccccatagcacaaaattcgggcaactgagaacccagctggcccccagctggtaattcctcaacattctggtgtgtcctaacattgccaaataggctggaaggatttagagaacaggaagtaagctactgggagataaggctgcagctgtgaattatagacaggggaggaaatgagaataacagcattagcagtttggctttatttttaaaccaaaaatcactggaaagatttctgtctctaatttaagggtgttactcaccttttcgtttatactagttggaactcttagcaaagtatgtaaatgggactatgtttccatgtactgctgcatctcaactgattaagaatcttttttttttttagaggtggagtcttgctctgtcgcccaggctggagtgcagtggcatgatctcggctcactgcaagctccgcctcccgggttgatgccattctcctgcctcagcctcccgagtagctgggactacaggtgcccgccaccacgcccagctagtttttgtatttttagtagagacggggtttcaccgtgttagccaggatgatctcaatctcctgacctcgtcatctgccctcctctgcctcccaaagtgctgggattacaggcgtgagccaccgcacctggccactgattaagaatttctaaaagatgaaattgagtctgtgaacatttcgtttatccaacaatggcaactgtgttgtcataagaccaaaaaatcttcaatttcacattagaaatcatttaaaaatatgttttgcctccactcttttgtgtttgtgtcatgctgtgactgtgcagcctttttcatggagaggtttgtttttgatggatattaaaggcaaaaatgtaaatgtggctagcctctctcctctggagtatgacatcttgtcatcaagtattattttacagagagagtcatagtggatgagtattcattggtattacatttaaataaggaaataatttaaaaactgatcagtcatgaacatcgtgttcttaatttgtcatgttctattccacagtggccattctgaagtacatgagtgactatgggcttaaataactaatgtgttagggaccaaattgtagccacatgcacatttgtggattctagtgcttgggtcaaatcattggcagatctgaaagatgtctgtgaagtgggcttttatttaccatttggaaatcctaaattttatgacatgttcaatgtcatttaaggacttttgttgatgttggtctaacttaaaaaaaaatcagtaattctaatacaggattttttaaactaagctaaaaaaatgaatctgggtttgttgccctgctccccacatgagttgagccccctcctttgtctgtgtacaaaggactgtattaatgtctgtttaggaaactgaactccagggagacaagatgtcctaatcgcggtccttggcacctaacaatgtctggtttatcataggcaggcaggcagtatatgctgttgttcaaatgcctttgggaattgaaagtaaactacttgagggagctgcggtggctccagccggttgtcctggcgtacaaggaggcgaggctatgcggtcgaggccaacttaggtaaaagtgaaaaaaaaaaaaaaaaaaagtaaactacttgaaatagtttccaataccttctatatagttcaaagatataagttaacaaggattacaacttctaatgatatattattgtttgcacaatatattcataattgctgtgtgtcagtattcaaaggtgaacatgcctctgtccttttcctcaagcagcacagacctgtggggggtgggtggtgttcacaagctgatagttctgtaagcactgcatccacagagctatgactagagcaaggaagagggtctcaacagagaggattccgctagatggggccacctgggagttctcagtgtccacatccatgcaaggtgagccatcaactggattcagtttttctagtgatcaccaggtctcaaaagattgcaacctcacagctgcctctgatttttgcagttttaaaaaagagctatgatattcttcacactttaagtgggtaataatttctcttgaaaaatttgattttattatacattttacaacaagtgcagataacaccaagtgtggccaaccaaggctgctcaaggcacactaaatcaggtgattcctgggggttcctcctagccctctggtgccctagacacaagtttaaagacctaaaatcaggtgtgtccatggcatcgctttgagaagtcccggggtttatgtgttggtctgaaagcagaaattgtactttggacagagggtgtgaggagggtcctgggcactgtggaagtctttaactatcagtcctttttattttcagatataaattagaatttggaaaccattaacaccagtgccacatgttcacaactattataattagctattaggcacaaaatgctgggagtagacaagggttcaaatcttcttttattcatagcaagagtactcttgcctggttagtaatagctcttattttattgatatatgtcagtatctagctgcatgtctggaggttctgacttcccagctggaacttacctgagaacaacaggtgtgtttcatagccaccaactcagtattagtcacatagcatgaatgtaaaaaatgtgtgctgaatgtgtcagactgaattaattcatgattaccaggatgggccaatcaggaacagcctcagggaacattctccagggtgagccctgccgtgttggtttggtggctcatggtgtccggggaccattccataaccctcagtccctcgctacttttactgggccctgtgaggcttccctcagactcctccggcactcacctattctcaaaagccacctagccgagttgctacctttttagataagtgatcagaatttttcaaattaaaaaacaaagttcttatactcagaaaatttgaagcttataatttcttgttatttcctctgtgataaatcgtaaacaacttagatttttcaagtatgtatttttttttccaaattaaccacatttagatgatttagatgctaaactattcagaaataagttagatacggaaaattttgcttctggaggaaaatgaacctaaatagtactcaccctttcctctttccatactaaataaataataccctgattcaaatccatagtaaatgttgttaaaatagtttccccacagcacaggactagcagatgaaggaccatctgagaggcaggtgctgggtgcggatgggccccaggtcgcctctttgtttttgtagtagtgggcatgttcgcactgtctctcattgttaggaagccgtgtcagtggggctggttccctgtggactctcgtgtgagctctgtctgttccctgccctgatccctgcattcgcccccagtcttctccctttattgactgcattctaattagttcaagtctgatcacatcacagaaataatcctggcccacagatttatttcctgtggtaaatgtcttcttggtggttttctaggttgtgctggtgaggtggaatgagccctaccagaaactggccacgtgcgatgcggacggaggcatattcgtgtggattcagtacgagggcaggtggtctgtggagctggtcaacgaccgcggggcgcaggtgagtggcaggcgcagctctgccagtgaagggctgcggggtagaggactcccagacaggcattccggagccagtgcgttagcaccacacagcgccacgtgctccagagctgggggaagagaaatcaatcaaattagaatcctacttttcatttctctcacatatgtcactggataaaaagagtacaggatcatgcccccttttcaaccatgctgctgttgtgagaactctccaactttcaaactttaatcagatctgtgaagtcattttttacccttcagtgttgtgattccatgttaaatttggggcctctggcatatcactgttttgcccccttcgaaaggtatcttccctgtgttgtcatctcagcggtctcatggagagcttcacgtgacttctcacaacctgctcaacaaggaaagggtgctacaatctcttccacaggcttcaatcagcacggcctcctgttgtcatcctccagctcttcctttctgacacagtttgtctctgctctcaggaaacagttgcacccaggacagcctgctgagctgcgctgtttctagaactgctccatagattgttctggtttacaggacggcttcatggtgcaccttttgtatgggtttaaggacacacattggagcaggcagctcccatcctggggattgtacaaaactgggacttaagaacctgaatcctcaggggatgtcaattaataattaatgaggggtttcttggactattttaactctcagaatgatttccctgtggctgcctttctatacacttctaaggtacttggattctcatccttccctcgcccacctgttgcttaaataagctgtgagcttcctaagctacagatcagtcaagtgacataaaattacaatgaatgaagacattattgtcagcggctattagcaggccgaggatttctgtaagatatcatcacagaagaccctgtgtgaaaacagcatttttttctgagttgatttggtagagtaaatgtaataatattgactgactgataaggccttaccagtttccttcaggctccttcagagcctgccccttgaccattaactggccttcttgaaggagagccacagatgtagacatcttcatgtgagtggacatgtgattaagagcatgagctctggaatcagacaatgtaggccggaaatcccaccccatgacttctgtgtgggagatacttgcctgtgcctcaggatcacagaggattacataagactgtatatgaaaagtgcccatggcaccgcttgcatcttatcacagtgcctgtagcatgtggaggttctaccaccttgtctggcatggaactgccctgccctgaagcagtagccataggtcatcaccaaagatgagtttcaggccttgaggtagcagcttttcttggtttctgtgaaatgaccgcctctccgagttggcctgtaaaggttctaaaatgctgtcattcttccattaactaaagcatgggattctcttccctagaaaggcccagtgatgaggtgagacatatcttcagatttagggtggccagaggacttgaaatcactgctcagaaaaggaaatggaaggggagcaaggataaatgccaaatgagtgcttgattttttcatgcgttatatctttcagtctccaggaaccctgttccaaaaatatcattattctcagttaatagaagagaagaatccaggtcaggagttgagtaacttgtccaaggaagttcatgggtggtaagccagaactcaaaccctagtttgtttgagtctgtaatgctccaccacactgtcatgttcccaaacaagaaatgattttctcttttggcagagatgcgtgtattcatagtgtagttacatgctgcataatgacgtttcagttatcacagactgcatatacgacggtgatctcataaggttgtaatggagctgaaaaatttctatcacctagtgacactgcagcatgacacatgactcgtgtttgtggtgttactggtgtgaacaaacctactgtgatgccagctgtataaaagtatagcacatgccattagtacagtccataatgcttgataataacaaatgactatgttactggtatttactgtactttttattattttagatagagtgtgcttcttttttttttttttttttgagacggagtcacgctctgtcgcccaggctggagtgcaggggcacgatctcaactcactgcaagctccgcctcccgggttcacgccattctcctgcttcagcctcctgagtagctgggactacagacacccaccaccacgcccggctaatttttttttgtatttttttttttttagtagagatggggtttcaccacgttagccaggatggtctcgatctcctgacctcatgatccacccgcgtcagcctcccaaagtgctgggattacaggcatgagccactgcgcccggccgcttctacttattaaaaaaaaaaaaaaaagttagcagtctcaggcaggtccttcaggaggtattcctgaagaaggcattgttatcataggagatgacagctccgtggatatgttactgccccttgtgttagggttctctagaggggtggaactaatgcggtagatgtatatatgaaagggagtttttgaaggagaactgactcacacgatcacgaggtaaaatcccatgataggccgtctgcaagttgaggggcaaggaagccagtggtggatccgtctgagtcccaaaaccacaaaagttgggaagttgacagtgcagccttgagtctgtggccgaaggtccaagagcccctggcaaaccactggtgtaagtccaagagtctaaaagctgaggaacttggagtctgatgttgagggcaggaggcatccagcacgggagagagatgaaggctggaagactctgcaagtcattcttccatcttctccttcctgctttattctagctgcgctggcagctgattagatggtgcccacccagattgagggggggtctgcctctcccagtccactgactcaaatgttaatctcctttggcaacaccctcacagacacaccaggaacaatactctgcattcttcagtccagtcaagtttgacactcagtattaacgatcacacccctgaagaccttccagtgggacaaggtgtggaggcagaagacagtgatatgaatgatcctgaccgggtgtaggcctaggctaatatgtgtcttagtttttaacaaaaacatttaaaaagaaaaaaaaaattaatagaaaaagcttacagcataaggatataaagaaaaacataatttggtacagctatatgtttgtgttttaagtgttattacaaaaggatcaaaaaaagtatcaaacttcttgaaaaactgaaaagtttaaaaagtaaaacagttacaataagctaaggttaattcattattgaggaaagaaccatttttttaatgaaatgagtgcagcctaagcatccagtgttgataaagtctacagtagctacaaggtaatgtcctaggccttcagtcactctccactcactctctggctcacccagagcaacttctagtcctgcaagctccattcatggtaagtgcccttttatagatgaaccactttttatcttttatactgtattcttactgtatgttgtctatgtttagatagctttagatacatgaatacttgccattgtattacagttgcctacagtgttcaacacaatcacatgtgtacaggtctgtagcctaggagtagtaggctgtcccatacagcctaggtgtggagcaggctctactgtccaagtttgagtaagtgcaccctgtgatgatcacacaacaagggaattgcctaatgacatacttgttagaatgtatccccattgttaatcgacatgactgtataccccaaggagctcaggcttcattaccattaaaaggcccaccctaccagccaagcagtgccaccagcacatggattctcctagcagtagcctctgtgagcaggggccctctatcatctccatagcagctgtgcagtcaccaccatccaacacttcccttgtgtttctttccattgagggtttggagcagatattagaaacaagaaagggagaatgagttcagccctggaggcaaatgagcttccctgggccacagaacatctggaagcacccagaatctcataaatgcctgcctaccaggtttgactaaagtaattactgtatgttgtgatctcattttagagttttgtttacttttgccatttggaactcagatttttcaaatcttagaacccactgagcaactgtcatcattaaacagtggcattctgggggaggcttggttgcctttaatcgtgttggagtcagatcttacccgactaaaaaggacaccacacactggtgacgatggatcactggtcaaggaactggtggctttctgcacctggaaaagttctgtggcttagaagaggagtgtccttgaaaccagctcagagaaaaagactactttttagaagaaatgacagattattttcattatatagcatgcttttcattgtcacaaagtaatcaaacatttggcaaaagctaagagatgctttaacaatttctttttcaggaaatgattaagagtcctttatttcaaaaatgagtttggaacagtacatgcattattttacagtattagtcaccaggggcggctgtaccaggcacacacactctgagacagtctgatgaaaagctgcctgggtcaatggcatggtcagcctgctgctcagcttcaattaatccatgcctgagaactctttagtaaagcaagagcattgcaaccttctgcagttgaaaaactaaaagaactggagtttctgcctttttgtgtgtgtgtgtttttttttttttttttgggagcgggggagacagggtctctctgtcacccaggctggagtgcagtggcgcatcttcggctcactgcaacctccacctcccgggttgaagcaattcttttgccccagcctcctaagtagctgggattacaggcatgcatcaccacacccggctatttttttatacttttagtagagacagggtttcaccatgttgcccaggctgttcttgaactcctgggctcaggtgatccacccgtcttggcctcccaaagtgctggaattgcaggcatgagccaccacttttttttttttttttttttaagcaattcgatacttggttttctctggttttgtttttccagttgtgatatagtcttatcacattatgttgacctaataaacccaaattgagccaagtggctagttgggagactgagtcaagaggatctcttgtgaccagagttcaagatcagcctggacaatatagcaagacctcatctcaacaaaaatagttttaaaattagcttggtatggtttcacaaccctgtagtcccagctactcggaaggcggcaatgggaggattgcttgagcaatccatttgaggctgcagtgaactatgactgtgccactgcactccagcctgggcaacaaagcaagaccaagtctctagacaaataaacagaaacccaattagtccatgtgaacatcctctattaccagtttttttgtgtgatgtaaaattgctggtatctctaagaagcttcattttactggctatgtgttttggctatggattaaggagatttcccaaaatagttttctcttttagtacaaatcttttttaaaatacatagttaaaatgcatgtaagtaaatagcattatctttgcaaaatgaaagagctttttatttttattccagaatgtaatgcgttgtttctgaaaaacattgttttatgttaatgagaaaaaccagacagtataattggttggaacataaagtcagtaaagccaaggttctgagtttatctgaggaaacaacttttttcagtaatctcagaccagctattcaagagctatctcacaaaccatgccattgtcatgatagagacattgctgataacacaacataaacccataacccctacttgaaaaacagcaagaagttcatgttcttttggtgtttgttcatttattttctcattacctgaaatgtaatatatccattaataccatagattttttaaaaagctaaatgtttgtagctataagcaacattgaagattatagatagcatttgttttgttagataagattaaaaagaaacacaatgtaggacaaattgaaaaagtaaaccaaggtggtagaaaacaggaacaaatataatgctaattagaataaatgtaaatggattaaatttaccaatcaaaagatacagcttagcagattacatttgtaaaaatctagataacagtatatcttgtttagagccacacctcaaacttaaggacataaacacatttaaaggatgagaaagatgtatcttgcaaataccaagaaaaaaaataaagctgatgtagctgtatgttagtatcagataaagtagatttgaagacaaagtattatttggttcgtagaagacagaaaggattatttggtaagctgtagtttaccaagagcatattttaaatatgtatacacttattaatagcatcacaataagtgaaggaaactaatagaactgaaaggaaaaattgataaatccattgacatactcagacattttaacgacagtcagcaaagatgtagatgatctgagcaacacaattaacaagcttgacctaaaggacatttataggttcttaattcaccaattagacaacatacttttttctcaaacacagaagggttataaaaattgatcatattctagggcaggattctgcaaaccttttctgtgaagggtcagatagtaaatattttaggttttgtggacaaggagccaaaattgaggatattatataggtatcatataacaagaggaaaatcagatttccaaaagatttttattgacaaaatttaaaatttgatttatgaacactgaaatttgaattttatgtaatttcaaataacaaaatatcattcttcttttgatttttttcttctcaaccacttaaaaccattctcagtttgtgggccatacaaaaataggtgacaggtcagatttggctcacaggccatagcttgccaatccctgttctacgacttaaataaaaaacagatttccagtgtcaggcatgatgattatagaccacgatctctgaacacagtgcaactgggttagaagttaataacgacgagataagagatccctgtctgttttttgttttgttttgttttctgaccgagtttcattcttgttgcctaggctggagtgcaatggcgccatctcggctcactgcaatccttgcctcccgggttcaagcgattctcctgtctcagcctccagagtagctgggattacaggcacccgccactacacctggctaatttttgtttttttttagtagagacgaggtttcaccatgttggccaggtgggtctcaaactcctgacctcaggtgatccaccttccacatcctcccaaagtgctgggactacaggcgtgagccacctcgcccggcctatttaggcattttaaaatatattgttaaatagctcatggtttacagaatatgtttaatagacatttataaaatcctagatctaaattataatgaaaacatgtcaacaaagcgtcgaactctgtaaaatatttgaagagatttattctgagccaaacatgagtgaccatggcccatgacacagccctcaggaagtcctgagaacatgtgcccaaagtggtcgggccgcagtttggtttttatacactttggagaggcgtgagacattaatcaaatacatttaagaaatgcattggtggccgggcgcggtggctcacgcctgtaatcccagcactttgggaggctgaggtgggcggatcacgaggtcaagagatcaagaccatcctggctaacacggtgaaaccctgtgtctactaaaaatacaaaaaaattagccaggcgtggtggcacgcgcctgtagtcccagctactcgggaggctgaggcaggagaatggcgtgaacccgggaggcggagcttgcagtgagccgagatcgcgccactgcactccagcctgggccacagagcggggctccgtctcaaaaaaaaaaaaagaaatacattggtttggtccagaaaggcagaacaactcaaaggggtccgggaggttccaggctatggtgaatttaaatattttctagttgacaattggttgagtttgtctgaagacccgggattgatagaaagataatgttcaggttaaaataaaattttgtgcagcccaaagttcttttgcagtcttatagtggctgtccttagagacagtaggatgacaaatgtttcctattcagattttaggtagtctctttagaattgggagggtctggaatcaaaagatctagcgatgttaatagagattctttacagatgcaaatttttccccacaaagaacagctttgtagggccatttcaaaatatggcaaagaagcacgttttggggtaaaatatttttattttcttgtcttgtaatgttacgccagagtgaggttggaaagtaaatcatgatatatagtgttaaataaaacccaacctatgtgatgagagtttatgatttgtagggcatgactccccagaccccttagataggaatttgggcaaggtaaaagaataagaatttagtccttcattgtataccggaatttgtgagatatgattaaagtggtgctgtgagagaaatgtatatccttaattacttatattagcaataaaactgtgatcattggtcagataggtatttatcttaaaatattattaattgaaaaggagagtaaatccaatgaaagaaaaagtaagaaataataaaaatgaaagtgaaaattagtacaatagggaaaaatgataaggtagagatcaacaaatccaaaaattagttctttggaaacaaatcaacaaaatagacagatgtcttgcaaaactgatcaagagaagaacacagaaataaacaattttatgaatgaaaaattgggcatagctataaatagagattacaaggtaaccaaacgtaaattataagatgcaggtagttcaatgggggaaaggtaaatcttttcaacaaatggtgctgaaacaactgaatatctgtattttttaaaaagaaaaccttgattcttacctcacaccgtgcataaaaattaactctagatgaatcagagataagtgatacggctccagtgagtggaggaacaccagggttcttaattctcaggccagtttagacaaaacacggacacatgtggagcggttttaaggagcggagagtttaatagacaagaaggaagcggaaggcagaaggaagaggctcccccatacagagatagagggagaggaggctccaaagccgaaagaggaggtccccaagtgcggtggataccagccaggtctatatgcagaggctgaaggaggcgatgtcagatttgcatagggctcaggggattggtttgaccaggcatgtgattcaccatgtagcctgcggaaaacgctggccctcccaccccagcctttaaatatgcaaatgcaggacgccaaggatgttccacacacgtggggatatgtgggggcggccatgttgccaggaacacctgggacaagggccggaaggcgcccgaatcgccatgttggatggacccagtttctaatggtctgcatttgcatatcaaaggttgctagcctggctctaagaaacttacaggctcacgcctgtaatccaagctctcagggaggcagaggccggaggatagcttgagcccaggaagtggagacctgcctgggcaatacagcaagaccccttcctccacaaaaaagagggggggggggggaaagaaaccttcccaggaccccttttcctctctatctgcctacaataataactcctgcaacgtaagtgtaaaagctaaacctctagaagtctttgcagcctggggctaaataaagatttcttagactggatgcagaaaacgtgatccataaaagaaaaaacttgatattagacttcatcgaaatttaatgatacgaagttacagttagacaggaaaataagttttggtgttctgttacacagtagagtaagtatagcaaataacaatgtagagcatatttcaagattgctagaagagaaaatgttaagtattgtcaccacaaagaaatgataaatgtttaacatgatatggcattaactctgatttgatcattatactatgtattcatgcattgaaacatcacattgtactctatacatatatacagttattatgggccaattataaattaaattttttcttaatttaaacttgtttgttgttatttgtttttgttttttgttgttgttgttgttgttgttttgagatggagtctcaccctgccacgcaggctggagtgcagtggcgcaatcttgactcactgcaagctctgcctactgggttcatgccattctcctgcctcagcctcccaagtagctgggactacaggtgcctgccaccacacccggctaattttttgtatttttagtagagacggggtttcaccgtgttagccaggatggtctcgatctcctgacctcgtgatccgcccacctcagcctcccaaagtgctgggattacaggtgtgagccaccgcgcctggccaacttcttctctttggaagataccattaaaaaaatgaaaaggcaagccaaagactggagaaaatatttgaagtacacatatctgataaaggattatatctagaatttatagagaaattttatgacagtaagaaggtgaaaactgatatttactatatatttttaaaatatatttgcccgtgttcatacagtcatcccttggtatccatagcggattggttccaggactttccacagatactgaaattcatggaagcacacgtatatgatgtaaaacggtatatttgtatataatctatgcacatcatcttgtatacttacttatttacttattttgagatggagtctcgctctgtgctggagtgcagtagcttgatatcggctcactgcaacctccgcctcccagattcaagtgattctcccgactcagcctcctgagtagctgggactacagatgcgcactaccacacctggctaatttttgcattttgagtagaaacagggtttcaccatgttggacaggctggtcttgaactcctgacctcaagtgatctgcctgccttggcctcccaaagtgctgggattacaggtgtgagccactgcgctcagcccatcttgtatacttcaaatcatttctagattacttataatacctaatacaatgtaaatgctaaataaatagttgttgtattatttaggggtaatgacaaggggagaaaaaagcgtacatgttcaatacaaatgtaatttttttccaatttttattcaaagttggttgaattcatggatacagaatccatggatacagatgacaaactgtatatggaaagagatttgaacagatataccccaaaagatgtgtagatgatcaatcaacacatgaaatgatgcccaacatattagtcattatggaaatgcaagttagacaatgtcggctgggcacggtggctcgtaccggtaatcccagcactttgggaggccgaggtgggcggatcacaaggtcaggagatcgagaccatcctggctaacatggtgaaaccccgtctctactaaaaatacaaaaaaattagccgggcgtggtggtgggcgcctgtattcgcagctactcgggaggctgaggcaggagaattgtttgaactcggtaggcggagcttgcagtgagctgagatcgtgccactggactccagcctgggtggcagagtgagacaccatctcaaaaaaaaaaaaaaaaaaaaaaaaaaagacaatgtcatacacctactagaatagttaaaattaaaatgactgacaacaggctgggtgcggtggctcacacatgtaatcccagcactttgggaagccgaggagggccgatcacctgaggtcgggagttcgagatcagcctgaccaacgtggtgaaacctcgtctcgactaaaaatacaaaattagccaggtatggtagcaggcgcctgtaatcccagctactcgggaggctgcagccggagaatcacttgaacctgagaggtggaggttgtggtgagctgtgatcgtgccattgcactccagcctggaaaagaagagcaaaactccgtctcaaaaaaaaaaaaaaaaaaaaaaatggcagccgacgcaagtgtaaaatgacgtaaccacttagtttttttgtttctgttttaggtttttttttgtttgttttgttttgtttttttgagacggagtcccactctgttgcccaggctggagtgcacgatcttggctctctgcaacctccacctcccaggttcaagcgattctcctattttagccttctgagtagctaggattacaggcacctgacacaaccccaggctagtttttgtatttttagtagagatgggaaacccatctctggtctcgaactcttgagctccaggtgtccacccattttggcctcccaaagtgttgggattataggcgtgagccacctcgccctgccctgttttttgactttttaatcgtagccattccaactgatgtgagatggtgtctcattgtgtttttgatttgcatttctctaatcagtgaagttgagcctttttaaatatgcttgttggctgcatgtatgacttcttttgaaaagtgtcagttcttattttttgtccactttttaatggggttgttttcttgtaaattcgtttaagtatccttatagatgctgtatattagacctttgtcagatgcgtactttgtaaaatttttctcccattctgtagattgtctatttactttattgatagtttcttttgctgttctgaagctctttagttcaactagatcttgtttatcaatttttgcttttgttgctattgcttttggtatcttcatcatgaaatctttgcccgttcctatgtccagaatggtattgcctagattgtcttcagaggtttttattgtttgggtttttacatttaagtctttaatcttgagttgatttttgtatattgtataagaaaggggtccagtttcaacattctgcatatggctacccagttatcccagcaccatttattgaatagggagtcctttccccgttgtttgtttttgtcagctttgtcaaagatcagatggttgtaaatatgcagccttatttctgggttctctgttctgttccattggtctgtgtgtcgtttttgtaccagtaccatgctgttttggttactgtagccctgtagtatagtttgaagtcaggtagcatgatgcctccagctttgttctttttgcttaggattgccttggatctttgggctcttttttggttccatatgaatttaaaaatagtttttttctggttctatgaagaatgtcattggtagtttgataggaatagcattacatctgtaaactgttttgggtagtatggcccttttagtgatattgattcttcctatccgtgagcatgtagtatgtttccatttgtttgtgtcatctctgatttctttgagcagtgttttgtagttctctttgtagagatccttcacctcactggttatctgtattcctaggcattttattctttttgtttcagttgtgaatgagagtttgttcctgatttggctcttggtttggctgttgtttgtgtgtaggaatgctagtgatttttgtatgttgatttcgtatcctgagactttgctgaatagcaatttggatagacaaattatggtatattcatacaacggaataatatgtataaaaaggaatgaactactgacacacggaattcagatgacactcaacatctttatactgagtaaaagtagtcagacagagaagttgaacatactatatggtaccattcgtgcaaaattctagaatgaacaaccagtgacagaaagcagatcactgtttgcctaggactagggttggggattgacttctggggcgaggagggactttactgcatgtaaattataccttaataaagttgatttttaaaaggaaaatattaacaactacttgccagcagttttgaaaacttacatgaaatggacaaattccttttcaaaattatcagacctttttttttttttttttttttttttttttttttttttttttgagacggagtctcgctctgtcgccaggctggagtgcagtggcatgatctcgtctcactgcaacctccacctcccaggttcaagcgattctcctgcctcagtttcctgagtagctgggactacaggcgcgtgccaccatgcccagctaatttttgtatttttagtagaaacagggtttcaccatgttggccagatggtctcgatctcttgacctcgtgatctgcctgcctcagcctcccaaagtgctgggattacaggcgtgagccaccacacccagccctaaaattaccagaactgactcaagaagtaaaaaggttgaaagtttagactgggcacagtggctcatgcctgtaattccaacacttcgggagaccaaggcagacagatcacttgaggtcaggagttggagaccagcctggccaacatggcaaaaccccatctctactaaaaatacaaaaattagctgggtgtggtggtggtgcgtgcctgtaatcccagctactcaggagactgaggcaagagaatcgcttggacccgggaggtggaggttgcactgagccaagatcatgccactgcattccagcctgggcaacagagcaagactctgtctcaaaagaaaacgtgaaagtttagtactaggactattaaattgaataagtggttaataatcttcccattacaaaaatacatagtcagatgatttggcaggcttgtctaccaaactttcaagcaacaaatcatctgtttatacaaattcttctgggcattgaagaaagagggactacttcagctcatcttgagagggtaacgtaaccctgctaaatccagagacgcacattaccaaaacaaaatcacgggtctactacattcatgaatgcagatgcagaaaatctaaagacactagcaaatcagcttcaactgtgcatataaaagacaatacctctaaattggactctggtaggtatgcaagaatagtatgatatgtaaaaatccatacaaataacttaccacaatagattaatagagggaaaaatgtggtcatttgaatagatgcaatagcatttgataaacttaacactcaagtataagtaatgtttttcagttagatttttttttttcttcattctgattgagggggtattgttagcaagactgaggggcaatataatcagaaacttagagctttactgttttggtaagggaccaacagactctgatggagaatctattactaaccataagtgagaggcagtgtaacagtggttgaaaggaaagaccctgtagccagatattcctgggatttttcctgtttctgtctcttgcctgctatgttgactgagtcttctctgtagatgagaacagtaataccttccgcagactgttgacttgaggcttaatgaattaatgtacatgaaacatacagaacactggtgatgcacagtatgcactgaagtcagtttcaatcatttttcttaaaaaaatttctttagagacaataccttgttctgtcacccaggctggagtacagaggcaccatgatcgctcactaaggcctcaacctcctaggctcaaggaatcctcccacctcagcctcctgagtagctaagaccacaggtgtctgccactgctcccgactaattattttgagacagagtctcactctgttgcccaggctggagtgcagtggcgctatcttggctcactgcaacctcttcttcccaggttcaagtgattctctcacctctgcctcccaagtggctaggactacgggcacgtgccagcacgcttgcctcatttttgtatttttagtagagatggggtttcaccatgttaaccaggctggtctcaaactcctgacctcaagtaatctgcctgcctcggcctcccgaagtgctgggattacaggcatgagccactttacccggccccgactaattcttaaaatttttgtagaggtagtatctcgttattttgtctaggctgggctcgaactcctggcttcaagtgatcctctcactttggcttcccagcattctgggtttacaggcatgaggcactgtggctggcctcagtaacgtttttatagctttcaaataacatatgttatattttaaggccatctccatcttagccaaaagtctaagttaatgactatgtctagactttgataaaatgttttccttttcagattacaaattgactcttttctgtgtgtgtccccaaggtgagtgatttcacgtggagccatgatggaactcaagcacttatttcctatcgagatgggtttgtcctggttgggtctgtcagtggacaaagacactggtcatccgaaatcaacttggaaagtcaaattacgtgtggcatatggactcctgacgaccaacaggtaacacttctgaaatgtggtgggtgtgtgacgttaaaaccatgagggctgggagggaagaaaggggcaggagaggggagctggtgcaaaagcctctttaagaatcacaatggaaaagaacaataaaactgtccaggtaaaaattaaaataaaaattctaaatgaaccataaattggaaaaacaacatttcccaccaatatggtaacattaagttaacattttaattatataaaatgttcatacaattttattaataaaatctgcataaatatgcagttgatattagatatcaagtaagttgatactaagcttaaaaaaaatcaggataggaaatgggatgtttggtatattgctacatcgtaagacaacaaagaagcccatccacatggtaaaaagctggagggaagtgaatcaaaaaattataagcaattttatagtaatgagcctctggttcgttttttaaaaattgaatttcaaaatgttctttaatgtgcctatttgactttcatgagaaaataacatataataacaataaaattctatattgataattcattttggaggccaggcacggtggctcacgcctgtaatcccaacactttgggaggtggaggcgggtggatcacctaaggtcaggatttcgagaccagcctgaccaatatggtgaaaccctgtctctactaaaaaaaaaatacaaaaattagccaggcatgatggcgggcgcctgtaatgccagctgcttggaggctgagacaggagaattgcttgaactgggaggtggaggttgcagtgagccaggattgtgccactgcgctccagcctgggtgacagagcgatactccatctcaaaaatgaaatgaaaatttttaaagtataaggattgactagttaaaatctttataaaacttgtgttttccatgtatagcagaatacatataatgccagaatgttttatcccagagatttaagtttattattggtaaaaaaccaagcagtataatatggaaccgtaactttcatttttgagccacttttttttaactgaattgctttcctctagtcactatatatttaatgtttccatttttcaagtaaaaagacaaatattttttctcttctcaaaattggtattatgagatttatgaaaaggtattttcagctccatgtttcttcccttgctttccccagaggcttccaattatcccctagtatttgtgtgtatttatatgaaatgcttagattcctttattataaagctgcatttttatgggtttttactacccccgagtctcagaagtgcgttgcattaagtgaccttgcccgaggcacctgatctttcctgtatcagtttctcctgtgtgacaaggactgtgtattatttcctgcctaatccccagggctttttaatgatcaaatgaaggaacagatgtgaaagcccttaaaaatccaggagtggatgtcttggcttcacattcttccctcgcctagagtgatggaacccatgagccatctgtgaggctcatctcatggtcctctgatgagttgtgccagccagtgtccccagcagactgtgcacatgtaggacaggcaggggacccactggggatacagcagtgagagagacgcagctcttgcctttgaggtacaattggacctgttgaggagacagacctctccttacacagaatctgctgccgtggcttggcaacgtgtggaggaggacttcccaggaagggctggctgtgactcccaagtcgaatctggggtacgttgttccaggcagcccaagcagagttccagggtattgacaccatggtgtgcacgtaccacagggagtggtttcctgctgccgtggaacgtgaagggggactcctggggctggaggagtcggtaggacaatggccatgggaagcatggaggccatgctgacgtgcctggccttgagtctgtagaccttggcgtgaggaaagagctgatgtggcaagcaattgggtacgtggccgcagcctctgtcctgatgactgcttttactaacaggtgggattttgttctaggaaagcgcccccactgcctttaaataaaatggttgcagcagggtgcctgttgtctcagctagtcaggaggctgaggtgggaggctcacttgagcccaggagttctcgagaccagcctaggcaacatagcaggaccccatctctgaaaaaaaaaaaaattaaaaaaaaaaaaaaaaggatttgcaggtcactgaagcaataaggaccctgggaaaaatttaccacagagaacatgtgtatcaggcactcagtcttgtttgaactgagacatagagcaggaatactcctcctcctgtctctaccactcattcacatctcttgcttggtttgattttatcaatgaaaaaagagtccatagacaggttgtgggccagcctgatgtctgtaatgtcaggagttggatgtggaaagcgcacccctgcagctcaggggctctgaacggtggacatgaaggtagagctgcaggaagccggatgagtctcttcctgcttccctgagaactttctgcctttaatgtgagttaaaatagcttccaggagtaaacctcttcctcacatcttgagctatattggattatagtgggattttaggctacttcctgtcaactttaaaaaatataagcagtgcatggctgggcacggtggctcacgcctgtaatcccagcactttgggaggccaaggcgggtggatcatgaggtcaggagattgagaccatcctggccaacatggtgaaaccccgtctgtactaaaaatagaaaaattagctgggcatagtggcatgtgcctgtattgtgcgctgttttgccaactttctattatgaatatgttcaaatgtacagaaaagttgagaaaataaaccttcctgaaacattttgccatatttgcactttttcctcaccactccccacttttttgtagttcttgtttttgaaagtaagtggtagacatcgtggcacatcacccttatatatttcaacatgtgtttcctgagaataaagcctttcacctgcacaggcacccctaagaaattagcaatgacattatctggtatctaggctacctttttatttccctaattgttacaggaatgtatttcatagtcttttttggttttttggaaccaggatccagtttaattcatgtacagcagttggttgttctgtctctacagtcttttagtctagaacagtttcccgttttttaaattgactttttcatgaggtcagtgtggccaccttacacgctgtccccacactctagatttgtctgattgtgtttacttatagtatcattttccttccggcccttgtatttcctataaactggaagttaagtctagactagagttggagtaaacaattttggcaagaatactttaaaggtaacatattctttactctgaaccacactaaaaagtgtataatgtctcatcctagtctgagggttgctgagtttaatggaacctttgtaaaaacaaaagttgctaggcgcagtggctcacgcctgtaatcccaacactttgggaggccgaggcaggtagatcacgaggtcaggagatcgagaccatcctggctaacacggtgaaacccgtctactaaaaatacaaaaaattagccaggcgtggtggcacgtgcctgtagtcccagctactccggaggctgaggcaggagaattacttgaacccaggaggcattgcagtgaaccgagatggcgccattgcactccagcctggtaacaagagggaaactctgtctcaaaaaaaagttatttttcacagcatgttgttaatgtcatctacacttaaacagctgatttgttcaaaggatgtgttttacttcaggctaaaattcatcttccattaaattgcaagaagggaatgtaatcctacctggaatttatttagtgggtgaggactctgtattagtttgcttgggctgccatgacagaatatcacagactgggcggtttcaacaacagaagtgtatttctcacagttcttctggaggctagaagtccaagatcaaggtgttggcaggtctcatttctcctgaggcctgtctccttggcttacagacacctgccttcttattgtgttctcacgtggacttttctctgtgcacccacatttctggtgtctcttcctcttcctgtaaggacaccagtcctgttggattaggttcccacccatattacctcatttaactgtagttacctctttacaggccccatctccaaaaatagtcacatttggggttcaacacatttgttcaacaaaattcaacatatgagttttggggcacacaattcagtccataatagactgatagaaaatattttggagaatataaaagttacagaagaaatagtgatataaactcagcttgataaacttaggatatatttgtaaatagaacaggttttatagggcttgggagcaaaccagaatgacacaaagagaaaatgtcaaataaatataagtatgactgggaaaaatatctgggtcctaagttgacgcagagtaatgctgcaacagtgaagcttttgcagttctggaaacatccagcatcacagcagggtctgccagagcgaatgtttcattgtctgtgttctccttgggtttaggagaataccttgccccttgatatgtgaaaattatttgagacgttgacattttgaaatattcttccagcatgttttggatcttagctaactgtcaattcacttggaaagcctttcaactagagaatgcaatgagaacctgagctgtgtttccatgaaaaaggttgacatgctgatatgccacccagcatttccatgctgagtgtggtcctcctagggcggtgaccagctgatgtgcctgaggccactgaggaaaggtcaaaagaagagccccaaacttcaatttgagactccagtttaaatgtggaagaattttgtggtaacttctgaatgaaagttaccacatacatgaaatggcatgggaagaagactctctccttgttcctgccagtctgggggagctccaagaagcagcccccacacgtttctctgctgtgggagacaacgggctctgcccagaactcttcccaggctgcggctttgtccctgtgtcatctctgataccccatctccagagagctcctgcagtgaggcacatacataatatgggtgcatgaaccattttttaaatcatcttaagacaatttcaaggcgttaaagcttatggaagttagtgacacccatttccccccacagtcagggtagccccctgtcctgggtcaagcaaagatgagtatcttgtgtatgtcttccaggcatttgcagcttccctccccagtcagtggttcctgtttcttgccccaggagccacagagcatgcttctctctgggctcttggcctcagatgcggtctccttggcagcctggtgcttccatcctctgctcggctaccttggttggcgtcttctggaccctgtcagcacatccaggcacgtcctttctgcagtgcctctcccagctggatcttgcctcctcctcccatcgctgtcatctccctccccggctcttacatggcatgcctttccatccaactcggtcccccttcctaggttccaacctcagacctctccccttttttccatcctttgggtgatttcctccattgccacagctgcatcagctcccatctgtttgctgctggctccccacacctatcccgcgctcatcgctcttgtccttcacactgcgacaccatcaccgtcaccaccaccaccatgcttgcagagcaactccggatagacgtagacgttgctcaagtccactgtggtctgaacttagcttcctctcccccctgcctctcctccctccggtccctcatctgcactcttatcttgcttatcatttatgccctaaactgggaattgctcatcgtttgtgccctcaactgggaatcctttatcccctaaactgggactctttttttttttttattttgaggtggagtctcgctctgtcgcccagtggcacgatctcggctcactgcaacctccgcctcccgggttcaagcgattcttgtgcctcaccctcccaagtagctgggaccacacaggcatgcgccaccatgcctggctaattttcgtatttttagtaaagacggggttggctaggctggtcttgaaccgctaacctcaagtgatctgcctgcctcagcctcctaaagtgctgggactacaggtgtgagccaccatgcccagcctggactctcttttctgtacctccaaccttcacttagtcaccaggtcctgttgattccacttcctatgtttctatctgagactatttatttatacttaaagtttatagatgattgtgctcaaaccagcttaactgaaagtatttaaggtttcatgtaacttgaccagaatgtatcacttgaagggaggttaatggttctcctgaaatacaggtacaggtatacttcactttatatagtggatgaaagaatgtaggtaaagtgagtttttgaaaacatgattatattttaactacccacctacaggaatctccctatttaaagaatattctatagaaattgcccttgtttagaaggcagttgtttttgaaatgagaattcttcacctcatacatgtttttgctagcaatatccagattttagttttccgggagtagaggtaatatttctttataaatactaaacctttttaaaaggagggagtcttaaatctggtattttcttagacgctcttaaagcacgatttcaaataaagtagaaagaatccgggctggtaagtattaaatagtcaccatggtaaagcttttagcttttcaggtcttggcacatgcagtactagtaggtggcattttattctctagcctcagtgctggttgcatttagttttgtgttttttaaacctagaaagtgggtaggtttatcctgtttgctttgggatacaaaaggtaggtcccaagtcccttctcatctgctaaggaggttttgcaccctgtgtagtctgttgtgtgctggtgtggtcatgtccctgaggccactgtgtcttcacagcagctaagcactgtcagatcatttggggagagaagcagtaacagtcactgaatgcctgtgcacctctgggacatctgtgagatgaaggctttttcatatacatgttttgcaagaaatatgacctttatttgctatttggagcagagtggaatcaggacttgagtagttagtgtaacaggattatttaaaagaatattttagtacagaatttttaattcatttatttcaaatggtttaaaaataaattttaggtcaggcttaaaatcatgcctgtaatcttagcactttgggaggccagagcaggagaattgcttgaggccaagagttcaagaccaaccagggtaatgtagcaagaccccatctctacaaaaaattaaaaaccagccaggtgcagtggcacattccagtggtcccagctactcaggaggctgaggtgggaggattgcttgagcctgggaggtcgaggctgcagtgagctgtgatagctcactgcactccagcctggggaacagagcaagatccggtctcaaataaaataaaaataatatttaaaaaaataattagtatgcagatgtcttttcagagatattaagggatgaaaaatgaactgttacagatactcatatgcaggtaaacgttaaaacattggtcagttgaaaagaataattcattcacttttaaaagataaagtcatgactgaagtacaatttagaactcaaggagatttcgtaactccccagagtatccaagtaataaatgattctggctgggtatggtggcatgtgcctgtagttccagctactcaggaggctaaggtgggaggatcccttgagcccaggagttgtgggctgtggtttgctatgtcattcaggtgtctacaatacagtttacttcctgggtgcaggggaccaccagattgtctaatgaggggtgaaccggctcaagtcagaaactcccattaaaacaggttaaaactcccgtgctgatcaggagtgggattgcacctgtgaatagccaccacacttcagcctgggcaacatagtgaaaccccatctgtaaaaatcataaaaagtaaatgactctgtagggattattaattatataatttttaaatttgattatgaaaattttcagtaacatgaaaaataaggaatccacatattttacatttgcttttttatcctttctttttcttcttctttgttgtatttaaagtgaatcccagatagcatatcatttcaccagtacatactttagtgtaaatctcctcaaaacgtggcatttccttccataaccacagtgccattatcacacctcatctgttccttacttggagggaggttcttgttggattgaagcatgtagtttggggctagctctgctcatggctctggaggagcgcacctgcagcaccggagaggcacgtgttcctgctgagggcttcctttgtcggcatagtcagaaaggaaaggatgtataaagggaactttaaaacagtagtataacgctttgctttctcagctaaaaacaccacagtttgtttgtttgtttgtttgtttgtttgtttgtttgagacagagtctcgctctgttgcccaggctagagtgcagtggcgtgatctcagctcactgcaacctccatctcctgggttcaagtgattctcctacctcagcctcctgagtagctgggattacaggcacgcaccaccatacctggctaatttttgtatttttagtagagacagggtttcaccatattggccaggctggtcttgaactcctgacttcaggtgatctgcccacctaggcctcccaaaactgcacctggcccacagatttataatgaaaagtaatttacaggttgggcacagtggctcatgcctgtaatcccagcactttgggaggccgaggcgggggaatcacaaggtcaggagatcgagaccatcttggctaacacggtgaaactctgtctctactaaagatacaaaaaattagcagggtgtggtggcatgtgcctgtagtcccagctactcaggaggctgaggcaagagaatcgcttgaacccaggaggcggaagttgcagtgagccaagatcgcgccactgcattccagcctgggtgacagagcaagactccgtctcaaaaaaaaaataataataatttaccgatatttggtgtataaatatcaactaacacatagaagaggtctgttctttgatagaaaaaagtcaaacttcccaaaagcaaaaagtcacaattcattatttgcaaggagctttctatttgccctaagaaaacattttcctctgctgtccctttaaggctggctgtaagcagaattcagcctcaacaactgccctcccagagcagctctcactcctacacagggcacagagcagctttctcttcctccctaagcagttctcacctcctcccagagcaactctctccctccacccacccagagcagctctcacttcctcaaagagcagctctcacctccttccaggagcctgctggttttgaatcctgatgcacctggtcttttaagattgtgattataggcactgcatagattttagtttccctgcaaagacttaaaagtcactgtgctcaatacaagaaaagaacatggtaatctctctcatgtaagctcttgtactagagtttctttttttttttttttttttttttttttttgagacggagtcttgctctgttgcccaggctggagtgcagtggtgcgatctcggctcactgcaagctccgcctcctgggttcatgccattctcctgcctcagcctcccgagtagctgggactacaggcgcccgccaccatgcccggctaattttttgtattttttgtagaggcggggtttcactgtgttagccaggatggtctcgatctcctgacctcgtgatctgcccgcctcagcctcccaaagtgctgggattacaggcgtgagccaccgtgtccggcctagagtgtttcttttttaaaaaaaaataaatctgacctggcgcggtggctcacacctctaattccagcactttgggagaccgaggcgggaggatcactggagtccaggagttcaagaccagcaacatgacaaaaccctgtctctacaaaaaatacaaaaattatccgggtgtgggggcacacatatagtctcagctactggggaggctgaggtgggaggactgcttgagcccaggaggttgagaccacagtgagccatgattgtgtcactgcactccagcctggatgacagagtgagtccctgtctcaaaaaaaaaaaaaaaaaaaaaaaatccacaaacctactaaagtaaaatctcaatggtcagcttctacactggaaacccttactggtgactggtgagtgtgctgtaagtaggttaaagggctggtaagagtggagctgctgctcatagctcctgaggactcaactttgcaatgagatttagtctaagccaacgcaaagagtgatcctttttcttctttcccatcagatctgcccatgactttttagtagtgtgaataccacacaagggaggcccatctttattttaagccctgaactaaacatatataggaatggttcttgtcaaaatcagcaaggagcacaggaatcacagttaggagaatgaattgctcaggaaagaagttgggagacagcctcccacccttcagggctatctttatccaatgattggtactggttcgtttttagttatttctttttgcgtgtatttgagaaattctgttgagcactttgtggaataaaatatgtttctttagcagaaacaggtgcagctactatgtttgtactttttcattttgtcagtgttttggttgattgacatgacagttaagatgtctagaaattaaatcgccctttgttatctctggactcaggcgatgaatcaccaaatagagcactcagtattgatgaattataaaatacgctaaataaaaatctttcttgagatttgccttgaataagcaaggcgcagtggctcatgcctgtaatctcagcactttgggaggctgagggggtggatcacctgaggtcaggagttcaagaccagcccagccaacgtggtgaaaccccgtatctattaaaatacaaaattacccaggcacgatggtgcacggctgtaatcccagctagtcgggaggctgaggtaggagaattgcttgaacccgaaggcagaggttacagtgagccgagatcacaccactgcactccagcccaggtgacaagagtgaaactctatctaaaaaaaatattaggttaagaataaaagatgagaggaatttattaatatacactggctcttgtcacatataccttcttaaagtcagttttttgttaatgcaacgttagattttcttcatatatctttatcaataccacagcatgatgatggccttggttttgacacagggatcttgcctaaatgccagcgtttagccagatggtgaactacaaaattgatcttcctggggttccacatggcactgctgctctacagcccctgaccttggcattgaatatgtccttatatgtgttaggaggggtgagatgtattgtttcacatgtgttcaccaccaggacaaaggctcgctccttctggtcaggcctctctgggccctcttctcagctggacctcaatcttggcctctaaatactgcagactctcggacataaattatttcatccacaccatcttcccttcccacacacacaccctggagcaaacactggcaccgtttctaacaactcaaggctgtgtcccgaggatgactgctccagctctcttacgttcctgcctgagagcctgccaagagaatcaactgtttgatagggcccatctcccaggctttgtgagagagtaggggcctaattttgttaagctccagttagtaaagccagagagcctaatcgcgttgacagcccccttcctgcttttcagttatttctgcttccctgaatactgcctatgcctccctcctcctccctcattctccctactgcagcagttattatggattaaattttgtccttcctgtattaactcaggtccagcttggcttgtctttggcaccggtcacaagtgctgttgggtctgcttgcaccactattccccagctgccactggtagcacagatcagcaaatcctttcctctcagctcatttgttgagaagtttatcagtagccatgggaagaaattactattttcatcatgtttagaaatatatttcagtgtgttttgaagagttgtaaaattttgaaatgggaaaggatttcaggctgacacttgggaggcagaatgatgaaccttactatggcactaggactcaaagtaggatgagccccactagctgacccccaggcccgattctttgcagaggataggatgttcccccaacaggctctgactacacaccaacaggccaagcagattccagcatcactcgcggtcttctgatcaaagtacacatgcaccttcccaggcctcttggtgagtggccaccctgggcagttatgccttacttcaaagagccgatatagggctatattcctgaagtgtgcctttcttcctcattcaatgtatatttaaatgtatttttaatggtatattcacatggtataaaatactaaatgttccacaggacatttgatgaagaggcccctccttctatccccaagctgaccagaggtaatgtgttttcagttacttgtgtaccgttctggagatactccaattaaatggttggttttttttttttttaatggagttttgctcttgtcccccaggctcctagagtgcaatggcgctatctctgctcactgcaacctccacctcctgggctcaagcaattcttctgcctcagcctcccaaccaagtagttgggattacaggcatccaccaccatcctcggcttgtttgtttgtttgttttttgagatggagtctcactctgtcaccagactggaatgcagtggcgcaatcttggctcactgcaacctccgcctcctgggttcaagcgattcttctgcctcagcctcccaaatagctgggactacaggcgtgcaccaccaagcccagctaacttttgtatttttagtagagactggttttcaccgtgttggtcaggatggtctcgatctcctgaccttgtgatctgcccgcctcggcctcccaaagtgctgggattatagacgtgagccaccgcacccagccaatttttgcatttttagtagagatggggtttcaccatgttgaccgggctggttttgaactcctgacctcaaatgatctgcccgtcttggcctcccaaagtcctgggattacaggcatgagctaccatgcctggccgtaaatgcatttttatattggttctgtagtcagactattctctactcctagaaattgatatatgggtatgtcttagaagggtgaataaacttaaaaatggagcctgaaagatttggagaagaatattctggtaataggaatcatttaacattaaatttgaggcctgaggcagaatatcttcttctccgaaaatctttagacataggagagtctctcatcttaataggttagtttacaagtggtcttttcttcagtgaagagatgagatggcttccaaattacatgtttagcctgaagatacagatttaggagtgattgttatagtcaactgtgaaattacatttcatcttttaaaaaaaaaaacaggaaatattctgttaatcaattgagcagttctgtcatttacaactgtctgatttcagtgactgtttatttagttgcaaaatattcaagtctggccttgaagcacatctgaaggccagtattctgaaacccaacagggaggtcttaaaaaattttttggccgggtgcggtggctcacgcctgtaatcccagcactttggggggccagggtgggcggatcacaaggtcaggagattgagaccatcctggctaacacggtgaaaccccgtctctactaaaaaatacaaaaaattagcctggcgtggtggcgcaagcctgtagtcccagctactcgggaggctgaggcaggagaatggcatgaacctgggaggcagaggttgcagtgagccaagattgcaccactgtactccagcctgggcgacagagcaagactctgtctcaaaaaaaaaaaaaaaaaaaaaaaaaaattttttttttttttttttttaacttttgccgcatctcagaacaaaaagagttccttccaaagaaaaggaggggcatcatggctattttttcatttctctatctgcagctacacatgcgtgccaccagaggtgctaaggttactaggagggatttgcaatcagttttttaatgtattcccccagccttcagtcataaaagcaaataagtgggaaaaagtcacctccttcaggaactagttccaatactacaaattaaactcttacaaaagagtgaacatttttggaagcatgtattattgaagttgacatttcccaacatggttttattcaacaatttagatgtgtagggtccaaagacaaaggtactgatgagatactgtggcttccaaaatagaaatcttttgaatgattttatatcctgtcttctcctcctttggttgtggcttggtttattttaaactattgataataattgtgtttatttttaaataattgcacctaaaaatagtttagaatggagtacattgaaataaagagattatatgtggatatcattattgcattgctttgtgtgtatgtgtgtgtgtcagagtctcgctcagtcacccagggtggagtgcattggagcaatcatggctcactgcagcctccaactcctgggctccagtgatcctcccgcctcagcctccccaggagctaggactacaggtgctcaccaccatggcctgatacatctttttgttttttttagaggacagggtctcaccttgttgaccaggctggtttcaaactcctggcttcaagtgatcctcccatctcaggttctcaaagtgctgggattacaggtgtgagccgtggtgcctggccgtgttgctattagaaactgccctgcagtgagtatatacaaggctgcaaagtaaaccaaacccagcgaggcagccattgaattagtatgacttgacctgtatgtgtctactgcttatttggtcctggtatatgcattacagagggagcattggccctgcccatacctgaagcctacagttcgtcacaggaaacagcaggaaaatatgggacagaaatgtacatgattcatccttgaaagtgtttttggggggtagttttatgggaggatttgagaattggtttataaagaagaatggaaggagattgctccttcatttgtaggaaaacttgggcaaagatttggacagaaatgtatttatattcattgagtcactgagtgaatgagaacctgggagtgcagacctgcccttgagatgcttttggtttactgggagacaggcacgcaaaaccagaaccaagttcagaatgctgtgggggccgtggttagagcaagattaattctgtgtggtggggcccagaagccttcacacatgatgtctgagcacctgccatgaaccagctgatgtactagacattggagataaagcacaagcctcagtccttgcttgatggggtctggttgtgtgtgtgttgctcaggaaaggatgcagtcatgcgtttcatcttagacatgttgacactgagggccttttgcacatcttggggagatggcaggaatgcagttggatgtgagagtctggggctcaggacagaggcctgggcagggagtcagctatgaatgggatccttgaggctacaggcatgattgtggtttcctagagagaagagggcctagagccaagcctggggagcactagcacggagaattctacaaacaggagcaccagcccacttagaacacattcattacttgaccaacattagggagcagaagcagcagagattgatgcacttgccatatgtgtattcgttattattaggctctcaatcttgttcttctgaagtcctttgctcacataagctttatcccattaaaagtgattaggcatgaaaagaacttgtaatggaagagatttttaaaaatctgattttatgttgtatcactgttcttcagtaatctgtgacatacttgttccaaaacagagtaacttcttccatcattgcttgataattaaactgtcagtgctgcgtttcccattttttccaatcttaatagtgtttttgtcttcctatgggaactgtagttgtaattcattaatggtagtggatttggggcctgccctttttgttctgtttttctttagtgtgatactaaactctgataacttaatcagtccttattcaggaattatatgtatgttctttcatctgtcctttcttctctaaaatggaaaaatgagtattaattcaaaagacctttcaatgcagagtcatttcctcccttttgcaaatactcctgtgtgttgtacatcatgacagggcctagggaggtactgttgagcaaagctgatgtggttcaggtctcagcttgggctgctataataaaataccacagaccaaggggcttaaacaacagacattgagttctcacaattctggaggctggccagcctcagatcaaagtgccagccaatttggttcctggtggaggctgactcctggcttgcgttctccctgggtcctcacatggcctttcctcagtgcttgggtgtagcgagagtgcttgcaagctggggtctctcatactcttcttatatgggcgctaatcctatcgtgggcgccccaccctcacgaccttgtctaaactgaatcatcccccaaagaccttacctccaaataccatcaacataaattggggaggcggggagctcataaacattcagtccataatagtccatcgcctcaaaagtttatagtgtaactaggggtcagacagaaatcacacaatcccacagtaaagggatgagaatagtgataagtgtggcaatgggtacagcttagttaaagttataagaagtcatgtttcatatttattgttattgaaaattgctcaccaagtacattaaacatctgcctcttccaggatttcagcaggtccgtgacccatgctccggtgtcttgaccctacgcctgtgtcacatgaaggctttgtagacatgctatcagatagtaattttttttttgacagctaaaatttcacctttttctaaaatgaatttcatggtgttcctagtagttatgtctttcctgaaaacagcatatagtaatgaattaattgctgcgtctggaggcaaattgttttagccttttttagtattcattcattaaaatatagatcatatttaaaggaatatttgatgaacaatttattctaaaataactgaattctgtgaactttctgcaggcagtctcttagtcatcagtatttatatcctaaaattgccttttgcttgtcactgactttagtgcattcgtttagcaataaatatttactgagtgcctgcattgtacacaaagctctgttaggtgccacatagctatggactgtctctcccccaaggagcttcacattaaaatctcaagcaaaaagaagcaaaaattgaaaaagccttaaccagctctccctttgggtaaattctagcctttctagtcagacagccttggcttgatcacttaatgcctttgtcagcttacttggcctctcttaagttgctcgtgtgtttgtaaattggagataacttgcatgattgttgcaatgagatgctgacggatagacagatcccattagacacaaaagatgtaaagtttttaatggcaaccaatgcagaaactgcagagaccatcacacaaagcagaacataatgcaatgtgatgcacctcggtggaggtcctgctgcccaggacccaagattcctctcaggatgtcccactggtggcaccactagtgttgttggttggttggtggcggcaggggggatgttcagcagctgtgaggtgctcctttgctgctgtcatggaggggcgcattcagccttcctctatccagattgttctttagctctggccatgtacctgtctgtattacccagcatgctcctgagtatgtgctctgagatgggtgaggccaaggaaggtgtctgaggagcagccctcagcacactgtggtagcaaaagcccacctgggccacaccagcaaaactagcgcctaactcatggttttgacaattaatgaggtagagctttcagcatagtgtttagtgcaaagtaagtacttaatattttaataccatgactacatccttaaattaattataaattaatacattaatactattattattctcagtgaagtaaaacattcaacattggaaataaaacattgtttcaggagcatcttcttttccaaatatggttatataacatgcttacataacccaatgtattttctctttggtcaaacataaacctaagctttttcttctaaatttgagaaaataataacaacaaatctctgctgcttcttcgttttccagaaaagtaaatgaatattttcctaactcctctcctccaatcaaaaatacaaagcaaaacccctgcaaatagtataacagagattttgctggtattatttgaaaacgttcatgcaatataatatactcattctgctgttagtcacatttcagtattaaaggactcaaattgttgcaggaatagccagcagaggttctacttaacattttgtgtcactgtgctgttgttacttaactagctatttttagttctaaatgtatattgtcttcctaaaacaaatcgaggcaacaaggtgtgccagaaactggcccttgctgccacttggtcagaggtccccatcctggattgcaggtgctgtttggcacggccgatgggcaggtgattgtcatggattgccacggcagaatgctggcccacgtcctcttgcacgagtcagacggtgtcctcggcatgtcctggaactacccgatcttcctggtggaggacagcagcgagagcgacacggactcagatgactacgcccctccccaaggtactcattggccctactttccttgtcactgaccagaaggacaaggaagggcatcggagcagagtagactgatgtggaggagggagggtgaagggccgccacacctacggcacccgggcttcctgggaagagttatcaagctgaaatgcaaggtagggctggcctcatctagatgtgactgtctccccgctgttgtcccttttctcagaatcactggtcgaattgattacacttaattcgcttagcttttcctagatataaagtgagacacatggctcttcctgtgtccctgaggtattgtggggcttagctgcttagtgacaataaagaaagctaaagatgaaaaatgctgtgctattattataacttaatatgtgatatatccaaatccccaatgttattaaagcccgcggctttaggtgcatgagaaaaggatttgttttgccataatgaaggccagcaccttgggcagataactctacatttctgtctgtcctctttatttcaggcagaagctctcctcctcctcaggtctaaaagacctactgcctctctgtatactccagttggtgttgagtactcttggtggggatgacctcaaattccagccaccttaacctctagcaggtccccagaatcagtgtgcagcactggcccactcagttggctcttcaccagcatcccatcccctgcacccatctcttttaaaaaaattgagatacaataattgtacatattcatgagctacattgtgatatttcgatacacataatgtatagtgatcagatcattttagttaacatattcatcatctcaaacatttatcatttctttgtgttgggaacgttcaatatcctcgttctaggtatttgaaactatataatatgataatatgttattgttaacatgtcatcctccatggtatggaacactagaatttagccttcctgcctagctgtaaccatctcgttttggggaatgggactggcttcttgattagaagtggtcacactgccgcaggcttctatccttagcctagcacagctgtgcttacactgctgtgtgcccttcatagtcaaagggcacagtgggtgctttctaacctttcctgccattgtggggcatgtcgtcctgtgaagggctgttccgggggaaattagagaaattgtctgcctccgttagaacctgcaatattctcgtgttgtgttgtcttctctttcctgtcacagtgtgttatgcttcccagcagcagacacgtatgtgtgtacacacatactcattcatttattcattttaggagaaggcattcacacatgaaaaacaattgagattaatggtagtgttttaggaccagtggcttgggggctttttatgggtattcctagcacccataaagcaatttaggaattaaccatcccctttcctaataggataccagccttgagagaagtgttggtcatatttctacagcctcataatagtaaagtcagtgtcttcatcacatggactcagcatactcttagaactcctctttagtgggtcaaatctagatttacttgcccccattttattattgaaaaaaaaaaaagaaaacaagggactgggcacggtggctcaggcctgtaatcctagcactttgggaggccgaggcgggtggatcatgaggtcaggagatcgagaccatcctggctaacacgctgaaatcccgtctctactaaaaatacaaaagaaaaaaaaaattagccaagcatggtggtgggcacctgtaatcccagctactccggaggctgaggcaggagaatggcttgaacccgggaggcggagcctgcagtgagccaagatcgcgccactgcattccagcctgggcaacagagcaagtctccgtttcaaaaaaagaaaaaggaaaaaacagaaaagaaaagaaaggaaaaaaaaacaggactcagagaccaagtttataaagcaagtccagagtaaatccaagaacagaattcagtccctggttgctcctccaggcagttgcccttctcagaagcagggggggcagtttagaggatgacaggtgttcacctttcacgtgcaacagggttcttcttagtggcctagggaatttgagtgtggaggtcggtatagtgcagtgtcatgatgtaaagcaaagcaataactgggcttcctctgcagacaactggcaggtaggcccacctcgatggctgctaagatgagcccagtgtggctgtgaagcctacaggagccttctgaaaacgttgctctatctaggcatctaggaagggcttacttttgctttttcaaacaccctgtgaaagaccaagtccatggtccatcatggccccttccttaatgtctgcatgaggctccagagcagggttttccttatgccggctgtgctccgcaggtgcagcaagcctctatgagccacatttagcccaaccttctctccaaatctgggctggcctctgtggctgcttatttcctgtaacattcaatgaaagaggatttagaaagaggatttggaacttgaaaagcaacttttttctctcttagaccagaattaagaaaatgtttttatccctcctcctaccatccttggatgttgtatgacattaaaataatttatgtctatatgtcattagaaccgtgtaacacattaacatcaagttagtaaactttcacacatattctcaccactcaccaattgcccccagggctatgtccctagtgtcctgcttcttactcacaaattctctgttagtgcccactgatggcccttgtgtagttcctgaatgatatagaatgtttcattcaggtagcatcccaatccagagtaggatctgcattgtcaggcaatttctaaggcaccatgcaagatttcagctttgggaacctggatttgggtggtgtgcttccctccttttcacttggcacttgtgttcctgcagatggtccggcagcatatcccatcccagtgcagaacatcaagcctctgctcaccgtcagcttcacctcgggagacatcagcttaatgaacaactacgatgacttgtctcccacggtcatccgctcagggctgaaaggtacagaatgctgcacacaccccaaacctgcagaccgggcctgtgtgtgcttgcctcaaggccggtcttgtacactctgtgcttactgattcctgtcctctgtggtgacaccttctgggcttcatggagtctgttaactaaagccactccctcttcactcctttgcttatctgataagtccatacctagtcttatctcaaagggagattcctgacattcagtctttgtcttagcctgctcttttcctcactatgacaagaatgatcctctctcaggtgtacaggtatgtttgcatctggcttacgcatgtctgcacaataaacggactgcagcacctgccatccctaaggcagcagatggtgcacaagacatcatttacacagaagcccctgtaattttaagaatctgacagtcttattaaggaactgatcatcactgtgcgataaagttaccttgaaagacttgtggaggttctgcaattactagactgaggcattgttgtgaagggcagcagtcaagtgctgataccttcctgatagatattatgagtgttgttatctcaaaagaaaatcagtgggcataggcatttggagtgttgtgaattttgcagttcaagagtactgttgatgttgttgaccccattgatgtgagttctatggaaaaacaatctgtctcttcagggttgaatggtacaaggtaaaaaggttttaaaattcaatacctgggctgcctctgacccttgatgtttaagggacctcctgtaatctgaatgaggatataggagacaagccaggaactttggtgtaactcgctgctgtcattcaaaactggccattggtctagggagtcattaccgtgcgctactgctgcttgcctgaattattcagcagtcacagggatgtaaagaatcaagtctaggctgggtgcggtggctcatgcctgtaatcccggcactttgggaggccaaggcaggtggatcacaaggtcagcagttcgagaccagcctggcaaacatggtgaaaccccatctctactaaaaatacaaaaattagctaaacacaaaaaattagccgggcgtggtggcgggcgcctgtagtcccagctactcgggaggctgaggcaggagaatggcatgaacccgagaggcagagcttgcagtaagccgagatcacgccactgcactccagcctgggtgacagagcgagactctgtctcacaaaaaaaaaaaaaaaaaaaaaaaagccgggcacggtagctcacgcctgtaatcccagcactttgggaggccgaggcgggcagatcacgaggtcaggagttcaagatcagcctggccaacatcgtgaaacctcgtctgtattaaaaatacacaaattagctgggcgtggtagcaggtgcctgtaatcccagctactcgggaggctgaggcaggagaattgcttgaacctgggaggcggaggttacagtgagctgagatcaagccactgcactctagcctggatgacagagcaggactctgtctcggaaaaaaaaaaaaaaaagccaggtgtggtggcgtgtgcctatagtcccagctacttgggaggctgaggcaggagaatcgcttgaacctgggaggcggaggttgcagtgagccaagaccgcaccactgcattccggcctgggcaacagagggagactccgtctcaaaaaaaaaaagaatcaagtctatatacttaactgttggttggcaagaatcatacctgcctctgcaccgcccccccccaagtaattactctatttttaaactatagaatatttttagaaacatattacataccctcttttgggcatcccaatctactgtctcaggactgtaattataaggaattacttaggctgtaaagtcctgagggacatgaatgacgttgaagtcctttttatcacacataggccctggtaggagttgagtacatattttttgtggtgatgatgaacttaaattcctgtgcttgtctgtaaatttttttctgaatgttctgtctttcatggagctaaaacacaggatgatcaacattaattcctaatgtatttataatccatgcttaacttttttcttcaaaattctatttttaaacctttaaaccaagtttattaattttttgagaacctgcctctagttcaggaatccagaacttggtttctctaccaaatatctggtgaaggctgaacataatataattaccactcagttcctttttattctttacgggggaatttttccagttttttaccaccctgcttatggaaactttattttttatgccttgaatatgcccaaggtattggagcaacagttctctcttttttttttttttgagatggagttttgctcttgttgcccaggctggagtgcggtggcacgatcttggctcactgagtcttctgcctcccagtttcaagtgattctcctgtctcagcctccctagtagctgggattacaggcgcatgccaccacgcctggctaattttggtatttttggtagagatggggtttcatcgtattggtcaggctggtctcgaacttctgacctcaggtgatccacccgcctgggcctcccgaagtgctgggattacaggcgtgagccaccatacccatcctggagcagcacttctaacgttttgcaaccatatgtgcaatataggtagaaggatatgttaggtaagttggggaggtgacccaaagtagccctcccaaatgtgaaatttttttccttgagttttcttctaaaaatacaggcaaatttaacattttttttttttttttttttttttttttttgagacggagtctcgctctgttgcccaggccggactgcggactgcaatggcgcaatctcggctcactgcaagctccgcttcctgggttcacgccattctcctgcctcagcctcccgagtagctgggactacaggcgcccgccaccgcgcccggctaattttttgtatttttagtagagacggggtttcaccttgttagccaggatggtctcgatctcctgacctcgtgatccacccgcctcggcctcccaaagtgctgggattacaggcgtgagccaccgcgcccggccaaatttaacattttaattattacctaactagatatctaaatctaacctaaaaatgttttcagttatttacaggatgctttcagcggggtacggtggctcacgcctgtaatcccagcactttgggaggctgaggcaggtgaatcacctgaggtcaggagttcgagaccagcctggccaacatggccaaaccttgtctctactgaaagtacaaaaattagccaggcgtggtggtgcatgcctgtaatcccagctacttgggaggctgaggcaggagaatcacttgaacccgggaggcagaggttgcaatgagctgagattgcgccattgcactctagcctgggtaacagagcaagactccgtctcaaaaaaaaaaaaaaaattatttgcaggatgcttttgttctgtgtcttcctagtttcagaaagttagattaaatcgaaatgagctggtgccatcaagtaggtgctgtaaggacagagaaaaagcttcccttctgtcctctctgaaggttccctgaaatgactgacagtagacagattaacaggagaaaaggcatagaaatgtattaatgtgaataagcataggacccacataaaataagagactcaaagaaaggccacatggttgaagtttttataccctttccatggaaaggagggaaatggggaggtgggtaggcaatcatgattagtagtaagtgatttctaggggaaatgaatggatccaggaggtagacgttaccttgttaataattcttaggaactgaacaggacttgtaagttatgggaaggtgaggggtagaactcttactgtgaccaaaggtttcgacaacttttattctcttctctggtggttaagtctttcctggttatttggggaaagcaggagatcagaaagtccctggctctgaagcagcttctaaggcatgcttgtccagcttgcagcctgtgggccacatgcagcccaggacagctttgaatgtggcccaacacaaatttgtaaactttctgaaaacattatgagattttttgtttgtttaagctcatcagctcttgttagtattcatgtatttatgtggcccaagacaattcttcttcttccagtgtggcccaaggaagccaaaagattggacacctctgttctaaggccttccagttgtctttaattcaaaatgctcaggccgggcacgatggctcacgcctgtaatcccagcactttgggaggctgcggtgggtgtatcacaaggtcaggagttcgagactagcctggccaatatggtgaaacctcatctctactaaaaaacaacaaaaattagccaggcatggtggcgtgtgcgtgtaatcccagctacgtgggaggccgaggtgggagaattgcttgaacctgggaggtggaggttacagtgagctgagatcacgccactgcactccagcctgggcgacagagcaagactccatctcaaaaaaaaaaaaaaaaatgttcagtgtaccaaaacaccatacttgggatctcgttctctgtgccccgacagtgctatatgtaggcaatttaccttttctctcttgggatcagaatgttttaaggacttagcctttacatgtggtatgaatagcaatcatttttgttttgtaacttatttttttatccactatcttacgggctatgttggtaaatactgggatgagacaaccagaatactgttggagacggcacatggcaatgtttttagcctggggtcatctgttctattacagacaggtcagccacttgtctcatagaggaaattaaaaaggtctccgatccacttggtttttctctattactgtctcagaggaacatcactaaagaactttggcagcgaaggaaggtaactcgcactattgttttagtgtatcaccagcactggaatttacgacctgtgcaaaagaacctagaattccacatagctcttggtccctgcccaggcctcttctgcatcagccagcacacttcattttcactgcagatgtgtctgtgggctcaaaggccgggttctggggagggttaggctctgattttgcttggccgtggtttgctgaggaagttctgccttcttcagattctcttccttcagaacagggacttctcttcatcacgcaataagcagggaattgattcactttgcttggggtttttacccattgttatgacttctactcttttcctgagtagaaataattcaatcaggagttcaggaattttctgcccaagccagttcatccctcagtggcaaagcagactcccagaggcactcatttcatcccacacttgccttgaaattaaaagctccaacccctgagctttgtttgtgttttttgttttgcagaattttctctttttgtcatttcattaagcacactgaaaaaatgaggagggaatttttgaggcaggtggtttcagtcattgatgccatctgctcctgtgggcagacctgataagatttgcccacgtcgtcctcattgagtacgtgcccctttttttcagtccttgcagtgaaacatacttcttaaaggaaaaaaaaatgtacctgttattttatcatcacacactttgctaattaattagttgctctttcctccaccccccactgctccacatgcacgtgtgtatgcacatacacaacatgcatgtctaatgactaataaagaggtgaatcatgcacatggtaatctaagggacaaagaactggataacttcagactccaaacagtagctgcaatatatatggtgcttgataagcactcctttctttttctgttaaaatttagctgcctctttttgacccagtaataccacacaaagggcttcttgttaatacaaaagaactaaattttcactgacttcatataaccttccagacttttaccaaaaaggatccataagattttctggctaaaagagaatagtgtaggtgtgctgaatttttttgtgtaaaacatatcagagaccgaaaacccacaccccccaaaatcattgagaagaaacatagatgcttccagagtacggacctcttgtgtgctctagaactccccattgcctgtgagggtgagattagagactctgggccacgagctttaggaaaagggaaaagaggcctactgagtagagcattagtttgttccttttaggttgtattctgaaacaaatttaaaaataggagattcaaacaaaattattactcaagtcttgggcaaagatactggggattattttttaaataagacagacatcatttacaaaaagtttctgaaacaaaaaagttctgtcctgactatatctaggcttctgtatccttctcttctttatcataatgacatgtagaaattgaatgagtattttcttttactttgattttcccactaatttctgaaaattttaaactcttgccctaggaattcaactcctgcagaaaactcacatactcctggctgacactgaacaattcagggttattctttcttagtcccactgctgaattcttcatgctagtactttatgagatagcctgtgtccctggtcgcggctgtgcctgtcatgtggctcaggactgctttatgctaaatcatcagaggcactcacatacgttgctatatcgcttgatgcatgtagctccataatcgttggaacaagaaatggcattatttacatggaatttaatcttttttgaaagagtgattcgcctttgcagatgacagtcatctcattataactttgcacctgcattagaagaagtcctggccgggcgcggtggctcacgcctgtaatctcagcactttgtgaggccgaggcgggtggatcacatgaggtcgggaagttgagaccagcctgaccaacatggagaaaacccgtctctactgaaaatacaaaattagctgggcatggtggcgcatgcctgtaatcccagctactcaggaagctgaggcaggagaatcgcttgaacccaggaggcggaggttgcagtgagccgagatcgcgccattgtactccagcctgggcaacaagagtgaaactctgtctcaaaaaaaaaaaaagaagtccctgagagtttgcttgtaaacatttggattcattcttgcctcagatagatagcccatctcgtagacagagcctgggagtgccccaggttgcttgctgagtccctgagcagtttccgaaagcatcataggtcagctctgcaggggcaacaacccacttttctgttggggaaagccaccttgcaatacaattcaaaaaaatattattttaaaaataaatacaagaatggtgcagttcaggtgaggagctgtggaaatttcatgtcgtcatctttatttctacaatattacaatgatgcttctgtcctaagaagcttgagacaccgtcatctttgttactactatgactgtttatgttagtgcctcaccttttggtttccttgtgtgcccaaagctgctctccagagaacgtcatctcagtttcctgatcacaagcaggcttttccctgagatagatccaggcattgaatgcccagagcacatttagtatgtgcacgaatcctctagcttcccctcgcatttgtaaaagaatctgattcaccaggatgtttttggttcttttatgtaatttttcatttcctgattgtggcaggtttttttccattttctattcatctgtaactgctttggctcagccctttgtctccctactttctgccctgcagctaacttcatgagaaagtcccgtgttccctgggtctggaaacctgtcttgtcccaggagacacactctagttttcaagagacgtgaaagagcttcagcaacctcagaatgttctggtggcagcatcaaaatcatgaccatgcatgaataaggggtattgtcatgtgtgtgctgatagagcccggggaccactgaattctagccccatctctgaaatatgtgcccatcagggcagagcattttcttttaagttccgcccagcttctctgcaaagtgggccactttagttctagatttcagagatctctgtataaaccagattacgattttagggtcttgaaggagaaaaaaaaaatgtcataaatcttattaatactaatggcttttgttttaccagcaagaaataagtaaattgctctcattgggataagataaaccttttaataaccatttcttataggcactgagtagtttgtaggtgggcatcgaatttccaatgtggaaattatgctgaaaaaactgtctcccagcaggggtatttattttcttttctaagccccacaacatcatcaaatgacaagagtcagcattctcatatgcatgtgtgtcctttgtatgaaccttatctgcccagtagtgcccagaaatcaaatgaatataaactaagactttgttttcgatgtgctttttacttttggcatttataaactctctgagtcatccctgggagtggaggccacagcagtgggaccagtacttatatgaatatacagtcataggttttattgtcttgctgtctcttaaaaaaaaaaaaaaggaagttctacaagtctcatggaaatactggaattggagatacatatttaacatgctaactttattagatcatgatttctacctaatttggttgtgtttcagtaaactacaatccccagtcatgtgacaaacacctgtttttaatagaatccatcatcttcagagaaattggttgtattcatgagctaaaacatgaatatatgggctgggtgcagtggctcacgcctgtaatcccagcactttgggaggccaaggcgggcagatcacctgaggtcgggagttcgagaccagcctgaccaacatggagaaatcccatctctactacaaatacgaaattagctgggtgtggtggcacgcgcccgtagtcccagctactcgggaggctgaggcaggagaatcgcttgaacccaggaggcggaggttgcagtgagccgagatcacgccattgcactccagcctgggcaagaggagtgaaactccgtctcaaaaaaaaaaaaaaaggaaaaaaccatgaatatatttttgttgtatttgctcagtgtctgtattttttaaactactgaagacagtaggcttgctgagtggcagtttgaggagggctgtgtccttgtgctgaccctctctcctctgtttcagaggtggtagcccagtggtgcacacagggggacttgctggcagtcgctgggatggaacggcagacccagcttggtgagcttcccaatggtccccttctgaagagtgccatggtcaagttctacaatgttcgtggggagcacatcttcacactggacactctcgtgcaggtaaggatgttctctggaaacaagtacattttcagcagtatactagtgaataggttattataattattgttgacaaattttattttaatctttttttaccttaggttgtggtgggtaaaccaggagaaataagggagaaagcagtttttgccttttaaccagaatgctttattctatttcccagtcaaatgagcacatagtgaataagcagagtaagctggtgtttatcatcagtctgaagcagaaatcagaaaattgcagaagtgaatgctgaatcttcacttattcacttgtaggagaggaagagtaattttcttctctactcttagtgagttcttagcaggactccccattgcaaaagacagattaacaagagaaaaacaaacagaagtttaataacttgtgtatctcctgcatacgtgggagttaacccaaagaaatgagtaagtctctagagtagctcaaaacattctcttagactacaggcttaaatgcttcacggaaacagagaaagaagggtgatattcattctgcagatttaagccaatgtcttttcttttttttttaagtctccagaagtccagtcatccttctcttcttggtgcagagagagagagacccttacatatgtagattttcttttctttttttctttcttttttttttttttgagacgctttctcacccaggctggagtgccgtagcgcattcttggctcactgcaagctctgcctcccgggttcacaccgttctcctgcctcagcttcccgagtagctgggactacaggtgtctgccaccacgcccagctaattttttgtatttttactagagatggggtttcaccatgttagccaggatggtctcgatctcctgacctcatgatctgcccgcctcggcctcccaagatgctgggattacaggcatgagccaccatgcccagccagattttctttgtagatgtaatttctcttacaaaagggtaactcttcagagtttaccctatgtctttttttttcctttttttttttttttttttgaattggagtttcactcttgttgcccaggctggagtgcagtggcgccatctcggctcactgcaacctcctcctcccgggttcaagcaattctcctgcctcagcctcctaaatagctgggattacaggtgcccgccaccacgcccggctaatttttgtatgtttttttagtagagacgggtttttgccatgttggccaggctggtattgaactcccgacctcaggtgatccacctgcctcagcctcccaaagtgctgggattacaggcatgagccaccactcctggcctacctaccctgtgtctttaccctgtgtgtatctcaaaataaccatctcgaaattatccttacgccaaagaggcagatctgtggtggcttattctagtctcctacagtcatatttggggaagcatgtcctgaaccctgtcacactctgattttatatttgttatgccagtgatgaacctttacattttaactaaattgttgttaagcagtaattttaaaagcttaaaagtctttaagaaagtatacacagatgggccccctttctatttgtttttatttcccagaaatctttaggccaccttatgtttgagtcagttatagtggaggatgaattatcagcagcgcgtaatagacgtatgcctgggagggagttgacagtggaggtgataatgaacaagaatctgtgtcctaggaaggggaacatcacacaccagggcctgttgtagggtgggggtagcggggagggatagcatttaggagatatacctaatgtaaatgatgagtaatgggtgcagcacgccaacgtggcacatgtatacatatgtaacaaacctgcacattgtgcacatgtaccctagaacttaaagtataataaaaatatatatatatatatataaaaagaaaaaataaatggaatagacttcattaaaaaaaaaaaaagaatctgtgtcctaacattactcagctcatcagagaggcagggataccagatatggggaaatctgtaattacatgcaggcattaaatatttaaatatatattttcttcttttaattgtggtaaaacacatataacataaaatttatcgtcttaaccatttttaagtgtactgttttgtagtgctgagtgtattacattattatacaaccaatttccagcaccttttcatcttgcaaaactaaaactctttacctattaaacaactactccctgtttctccctcctcccagtccatgagaagcaccattttactatcttttctgtgagtttgactctacaaacctcatgtaagtggaattatgcaatatgttgacaaaccaaattctgtacaatatttaaagaggtttagtctgagccaaatatgagcaaccatggcctaggacacagtctcaagaggtcctgagaatatgtgatgtgccttaggtagtcaggtcacagcttggttttgtacattttagggagacagaagttacagacaaagacatacatcaatacccgtaaggcacatgttggttaagcctgtggaaagataggacatcttgaaaccaggccatacacatgtcacaggtggattcaaagattttctgattggttgaaaatctttggttggttgaaagagttaagctttgcctaaaggcttgaagtcaggagaaacaattgcttgagttaaggtaagggggttgtggaagccaacgttcttgttccccgctgcaacaccccccgccgcaagacggaggtcttgccctgtcccacaggctggagtgtagtggcgcgatctcagctcactgcaacctctgcctcccgggtttaagcagttctgctttcaccctgttgaccaggctggtctccaactcctgaccttgtgatccgccctcctcggcctcctatagtgctagaattacaggcaggagccactgcgcctggccccaaggttcttgttatgcagatgaaactacttaagtagcaggcttcagggtgaataaatggtaaatgtctcctttcagaccttaaaaggtatcagactcttggttaaatgtctcctgaatcaggaaaagacctagaaaaggaaggagattctctacaaaatgcaaatttcccaacaagagatggttttgcagggttttgccatttgcgggttttgccatttgcaggttttgccatttcaaaatatatcaacaaactatatttgggggtaaaatactttgatttccttcaacgtgatggtatgtcataatcacgttggaatttggtatcttattgctacgaagagtcagttttatcagtctttcctctattttaatgttaatgttggtcagttgtgcctaaaccccaaagggatgggggcaatttaaggaccatgcccaaacttccttcctgtcacagcctgaactagttttctagactcctttgggatccccttggccaacagcaggcccattccgtaggttgggtggcttagaattttatttttggtttacaagtgtttatttttttctgactggcttatttcacttagcataatgtccttaaggttcatccatgttgtaccatgtgtcagaattttctttctttttaaggctgaataatattttattgtatggatataccacattttgtttacccattgatggacatttgggtttcttccatctttcggctgttgtgaataattcttctgtgaacatgggtgtacagatctctttgagaccctgcttttcaagtcttctggatttgtgcccagaagtggacttgctggatcatatggtaattctatttttaattttgtgaggaactgccgtactgttttttcatagcagcttgttaacagaaagactaaactgtaaaatattttaaagaggtttattttgagccagtatgagtgatgctggcccagcaaaacagtctcaagaggtcctgagaaagtgcgcccgaagcagttgaattacagtctggttttgtacatttcagggaggcaagagttacaggcaaagacataaatcaacatgtggaaggtatacgttggctcagcttgaaaatgtggaatatcttgaaaccaggagaagtagaggagtatacaagtcaggtagattcagagattctttaatctacagttagttaaagcaacaaaatttggtctagaacttgggagtcagcagaaaggaatattttaagttaaaacgttcggaagctatgtcagagtcagccaaaattatgacccatttagtgagattgatggcctgtaggcatggctcaaggcttgccttgcatggccttaggtattgtttagaatttgttatcttattgccatcaagagccttttgtcagtcttatgatctctattttaacatttactcaggtcagttggacctaaattccagatgggagggagtataatgaggttgtgtccagcctcccttcctgtcatggctgggaattcagtttttaaggtttttctggggtttccttggccaagagagtctccattcagtcgatagggggcttaggattttatttttggtttacaagcggcaccattttacattttcactaacattacacaaggattctagtttttccacatccttgccaacattgtcatttttctgggattttttttggactaaccatcctcttggatgttaggtgatatctcattgtggttttgatttgcatttcctaaggattaataatgttgattagtgatgttgtcgtgtatcttcttttgagaaatgtgtgttcaagtcctttgcccatttttcaatcaggttatttgggtttttgtttttaagaagtaggattaaactgtgtctttgggcagtataatattttgagcaaataagcatatttgttcactcatttgttcaagcatccagccaagatattttgaggagctactgtgtggctggcactgagctctgagtgcttgtgtttcagggctgaacaaggaagacatgatccatatctcctaggagctcacagctagttaaggaagacagacaagtgatgacacagaaatgcttttgactttgaagtagaactgtttacctggtgctttgataacctggaggaaaggagtcttgcacctgctctttgtgggtatttttccacctctgcctgatcacttttcgcactctgtattcctcagacaatttcaaccagtcttacagctttaattccaatctcaatgaaggtctgaagcctaaggaaagaggcctgtatagacccacctgcttacttcacagacccattagccatctcataagcattgcacattcaacatgcccaaatctcggaacactccacctcttaaataatgctcctcttccaggttgtggtccagctgctcaagccagaagtcagcagtcagcctgtccactgaatcccagtgggtatttttacctcctagatatcttcatgtctacatccttttgtcttccttggccaccaccttagtccaagccaccctcatcttagctgcagtgtttgagccacgactttccctttcttttttttttttttttttttggacagagtttcgctcttgttgcccaagctggagtgcaatgttgcgatcagcgttcactgcaacctctgcctcccagaatcaagtgattctcctgcctcagcctcccgagtagctggtattacaggcgcgtgccaccacacccggctaattttttgtacttttttagtagagatggggttttaccatgttggccaggctggtcttgaactcctgacctcgtgatccacccgcctcagcctcccaaagtgctgggattacaggcgtgagccaccgcgccctgcctgcctttcccttttaaactgttcttcactttgcagccacagtctttgtaaaatcacaagtcagatcagtagcttcttactatccttaggataaagttaaaaaattcattgtgccttaaaaagatcaccataatctggccctccatcccctctagaattagctcttaccactccatcctcctctgaccctgccaatctggatttttctgtttctcagtttaccagatgcctcctttcttccaagctttgcaccacgcctggaacagatcttggctcatggcagtctcagtaaatactggttgaatgaatcagtgagccttaacattgtatcttactgctgcccattacttggtgagttatgttggggcagcaatcctctccagggggcaccagctgcagagagtctgtcccttgcagacccctgacccagcaacggatgaataaaagtacactgacacacagatactctgctttgccagtccagctgtgtgggagccgcttacagactccctgctgagtcgtgtaaacagttgcgactccactcgcatttattcagtaagattaattaacaaaagcttgagtcaacaccattagagggtaattgacattgtggacttccccagtaaaaagcacttaagcacctggtacatcaaaggttagtcttaagattatatgagtaaacaagctaggtaggtaaactacgctgcctttctttattactattttaatttgtttaactaaaggtaaagggatcaggccgccttcagccagataaattaccgaagttacacaaacttctcagttttccaagatttgtgtctatttctataactatctctaatatttttccaccagcctgattgaaccccagcattatgtaatttccaaggatcagataacttaaacttatttgccatttatattatctcttggtttctttagccactggcaatcgtaacataatttcttttaaaaaaattaataataaatcacttttagaaatagaatacagtttgattacagcatagtttatgtaagggacaacaacaggaagtaagactagaaaagtgtcttaggaccaaatgtgtcttagtctgtttgggctgctataagaaaataccttagactgggtgatttataaataatacaaatttaattctcacagttttggaggctgggaagtccaagatccaggcactgatagattcagcgtctggtccgctccatagatggcgccttgtgcctgtgtcctcacatggtagaatgagtaaaagcagggaggcgcctccctttaatctcttttataagggcactaatcccatcgtgagggtggaggccttatgacttaatcacttcccaaaggccccacctaataccaccaccatgggaactagattgcaacaagaatttcggagggacacacattcagaccatacatagcactgaccaagatgttaaacttcatttggccttttgttttgtatttttattttatgagcaagggagaggtgagacagggctttggggagactaaactgacgtcagtgttattatctcagtaagacggaatcaggacaaaaatccagaacggtgaaaatagagtggaagagagacacagagttcagagagattgtaagagatttggcttctggaggactgtgaggaggaggaggtcagtactagtgaaaacagaccttttttttttttttctcgagacaggatctcactctgtcattcaggctggagtgcagtggcatgatcttagctcactgcaacctccacctcctgggttcaagcgattctcccacctctgtctcccgagtagctgggactacaggtgtgtgccaccacactggctaatttttgtattttttggtagagacagcgtctcaccatgttggccaaggctggtcttgattttctgacctcaagtgatctgtctgcctcggccttccaaagtgctgggattacaggtctgagccaccacacctggccaaaagcagaccattttagttactgttgcagccacatctctaagtgtggaaggcgtttggggatgagggactagaactgaggcaagagattggggtggagatagagatttggagtcatccacatggaggccatagttggagaaatgaaatggatttaatgtcaaaggaatgaatagaacgaggggaaatgaggaaagggccaagcatagaactttgggtagtggagtgatagccttcatttaacaagcagcagaaggaaggagatggaagaggaatgtcatagagagctgttaccaggggtccttgctcccagagctcccaagatggtggtgggctgcttccagaatggcggcgggccacttccaagatggtggcaagcctcgtgttctctgacctggggttcttggcctcacggattccaaggaatggaatcttgggccatgcagtgggtgttatagctctattagaagtcgtgggtcacggaagagaaccgtggaacccagtgactagtgttcagctcgattagggtgaacacagtcacttagccgtgcaggaacaatggcaagcctttagcctgatcgggagcggcaatgggcacctcgctggatcaggaacacagcagacaccctgccagattcggagggatgggagtcagcggcgggtctgcgacggcggcaaacagcagtggtggacagcgagcgaaagctcagcttgagccttaacaaacatggaccagaagagtgcagttgcaagatttaatagagtgaaatagagtgaaaacagagctcccatacaaagaggggacccaaagggggttgccgttgccggcttgaatgcctgggtttatatcccgatccttgtccctcctgctgtgctctcaggcaagagatgattggctatttctttacctcctgtttttgcctaattagcattttaatgagctctctaattggttgggtgtgagctaagttgcaagccctctgtttaaaggtggatgcggtcaccttccaagctaggcttagggattcttagtcggcctaggaaatccagctagtcctgtctctcagaaccattaaaggaaatatgtcaaacaagagaacaacagttgaaagtagacatgaaacattggatttggaggttttaaggtcaaaaatggtctcactagaatggtgatggaagtcacatggtaaaagatttttcgttcattcagtcatctttattgagccatctgtatgccaagcattgttctaggtgctggagatacagctgtgacagccaagataaagaattggcgactaagcagctagtgaagaagttgaggcagcacatgtaaactactgttttgactgggtttgaggggaaggcagagagaggatggtaacttgaaatggagaggcatgactgtgttcatatacaattaataagtctttggggaaaaaagaagaaataagcaagaaaaagtacagcaagggacaagagcccagtgcaagttggaagatgtgggtttgagggcagtagggaggtttaatctggaagagacagaaaggaaggagagattgtagaaagagacaaaggatttttaagtacaggagggagccaaagcacacacacactacaggacaatgcctgtcttctcaataagctaaaaaggcaggatgaaaagcacaaggaagattcggcaggagtgccatggagtgccatccacttgccattccggataataaagtgagagtcagtgatgtccatgccttcactgtaatcctagagtcagtagtaccgattgcctaaaattaggaactggaaaggtgagtgtagtagcagggccaaggagtcgaaggaatctaggaaactgctaaggatactatggaattgggcagccatggcatcagtggttagatacttcatgacctgaggctaggaagtgtaaagtcataaaaagacatgttcaagaggaggtgatacaaacaaaatgggaagttgtggttggatagggactttaaatttctgttttggaagtgaagtcattctgcgttaacccaggaaagagctgaagtagaacagagttaaggccatatgtatgaggccagggcattggcaaaacaaacataaatattagagttcctgtggatttgggattgaaggaaggagagattaccttgattctgtttgtgtccccactgccagttcattgcctagaacgtagtaggtacttagtaaatctttcttcagtgggtttatggatggactggtgtcaacataggctttctttcatctttctgttgattgtttgaacctgtaggctgtgtcacatttataatcaatctgatgctggctttttataaggcttttatgattagaatatttgtgaattcaagtgctgaaacacactcagcattgtccccacttcatctgacttagggcccccttcctgctggcattgtgttccttctacagggaatgtccttcccgccgttttagctcaggaattggatcctcctcagtgccagctcagtcacgttttcttttaaagctgcctagtggattgaggctccccttctctgtaaaccctcggggtgtttaacacctctggcatgtattacacttttctgtctacttgtcttattttcctgaagacagaggcttcctttttctgaccagtgcctagactgtagtaaaggttttatggccttaaccattgcagaagttctcatcagccatcacatgaaagtaacatggatcctgaatttaaactatttgagctcaggaataagagaaaaggccctgactgatcttcctttgaagaaagatatccctacagtacctcagcatttcaataaattattgattctttttttcattgagggtccatttcaaccattgaaaaaatcgcctcaataatagaaagttaaataatgatgccattaaaaatcaagtacaatattaattatatttagcaccagtttaactcttgtctaatgattcgaaaatcacatgtgatctatgctgtgctattcaaggagtccaaaggcagggacatttttatagcaggaaggaagttaggcgatttattggactgcttataaaaagaactaaatgcaatttagattggataatgtatttccaagttaattagattgtagggtattgcgtacaaaaccattgcctgggacgaacttgcagcagcagcagcagctttaaaattgattctcctgatttacttgtaacagcaatgcttgtggctggagctcttctaaggaaatatgctctgatttattttcctttctgtcctacatgttgtaatgtaaaattctgtaatttatctcattagctgttatctgtgactctctatatattcttgcatatctgaaaatataacaggttttcagagttagcactactgactgaagtttgtaggcttcaataatttaggcccaggtttttgttttgttttatggtcttctggcattgaaggccagtggagaggtcaccctatattctgtaaggttcagttgttgatgtgatactgggtaaaaaattaagagaagagaaggtggaaaaagatgggtatgggaatttaaaaatcaaataagagattgcatgtgtgattgtggacttctgtactcttggaggcgaatcctatagcaaaaatagacttgcattctttcacttaggattaactctgcctgttctgctgaagttgcccctgttgtgcttttcccattttttcttgtaagtagatgagaaagtccttcatgggtcttgtctgcttacaaaatacaaggatggttgtgttcttttaaaactaaaatttggttgaccgaacgctgaactagcttttattactacaatttagttggtggccaaatcattataactttgtattcaaaattgtctgtggctccaaccaacgtagtttgacggtgaccgatcaccaacttggtctgtttttgtttgtttgtttttagacagagttttgctctcgttgcttaggctggtgtgcaatggcgcgatctcagctcactgcaacctctgcctcccgggttcaagtgattctcctgcctcagcctcccgagtagctgggactacaggcatgtgccaccacgcccggctaattttcttgtatttttagtagagacagcgtttcaccatgttggtcaggctggtctcaaactcctgacctcactgattctcctgcttcagcctcccaaagtgctgggattacaggagtgagccataacatgcctggccttttaaaaatttgttataaacagagtctcactgtctcccaggctggagtgcagtggcatgatcatagctcactgtagcctcaacctcctgggctcaaacgatcctcctgcctcagcctcccaagtagctaggactacaggtgtgcaccaccacacccagctaattttgaaaatttgttttgtagagacagggtcttgctatgttgcccaagctggtcttgaattccttgcctcaagcaatcttcctgcctcagcctcccaaagtgctgggattataggcatgagccattgcaccttgcccttcttctgttttaaagtgaactattttgcacatgtttgtacagacataaaacatttcatcctactaggtgcattttcttcaagacagatcccccatccttcttagggagagctacagaaagaacaaacaaagggtggagagggaggctggagagcctccgactgtcccaggaatctgcctcctcggtggccgggtagccagtcctcagcccaaggcctccctcagtcatccagaaaccctgtgctggcactgcctggttttccctgtccaggaccagtatagttggtttttgttcctcctacattttcagaagactctatccaactcactgctatatacaaaaatagtaatatagtgaggaagctttcaattccaattaaatagatttctcctctcagccaggcctctgctcaaaccacctccagggcagcctccctgctccctctcttcaaaaagacccccttgctgttgctctggctctcgctcaacactgttttttacttcacggaatttcactacctcacgttatcaggtagttcctgtcacagatactgagatacaggttgagtactccttatctgaaatgcttaggaccagaattgttgtggatttcagatttctttttaatttcagaatatttgcattgtatcaggtgagcatcccaaatctgaaaattcgaaatactccaatgaatatttcctttgagcatcttgttggcactccaaaagtcagattttggagcattttgggtttcagattttcagattaaggatacttcacctgtatttattctctccctgccacgccaggatgtaagctctacaagggcagagaatgtatttgattcattgtcagtccccttataactagcatggatctgtccatttgtatacatttagcaaatatttatctaatgactaacagctcagtagataaaaaaatgattggctggacgcatggcatgtcttgtgtactagcaggaggagaggtggcagagtaaggaacgggcaccaggccttgattgccacactccctggtgggaggtgaggcagggctggcccgcatcttttcctttccggggctcagcctcagcattgagggggagaagccagaggagaagcctgcccctccatgggccactcgcctccagcactgtggcctagagtttgtcctttccagctgagcagtggttctccctgttccaccagacccacactccctgaaatgcagctcagtttcttgcacttttgcctcagatttagacgtgtaaaatatgtgaacctccctatgcaaattaagatttgaatgtcatctgcttcacagttctagccatcagttctaaaaatagtcgttttatgggatttgagaaagagattaagaccgcaaacttacaattgagtttttccctagcagacagcagctgttcaaacacaacgtgaatctgggagctttgaagagctgtgctgttctgctgcggctcagcctagtaggcggaggttcttagggaggaggtaccttcagcatgggtgaggtctgtgggcctgcagacagtgtgttcatgttctgccatcacccatgaacctagaggacagagtgatggaaattgatgactgtgaggtggcaaaatcaggactagcgttagtgaacgccccgccccgtgtctgtggccacatgcagttagcgccatttgactcttgttcttgccaaaactacagaacatttgtagcgagggctttataggctggaataccagtaaacagccagggaaaaattaacaccagcagaaatgtgacttttaaaaagtaagatgacctgttagggactttctgtggacttacaggggtcctgagaagtcataccctgctgcctcacttctgaccaaacagtcatcacagtcattcatttccccaggtcagtgatgactcagaatcttcagacaagaggggcagttcttgttatctgtcactccttccccgtttttctagcacagccttaaaattattatggcaaaggtaccagcgtttattttgctgctttatcatcttacatggactatatgctacacaaactaaattaaattaaatcaatgtgtccgtgccctgccctctcccagagtaagttttcacttacttgggcaagtaaatgagtgctgcaccctaattaatttaatgtaaattcctgtgttggtgttcttgtcccattcttagaagaggggatttcctggtaacgttgccctagataataattattcctttgagaccctgcagacctcacttctccaggctaaataatttcagccctttttctcccaggttctaatgttccatcctttaatctttcgcgtcttctcactcctgcttggctgagaattccaagtcgtccgagcgaatgcgctacctggtttggagtcacaccatcctccctcgccttcgagatgtgccagcgactgtgttccgtgttcatccaaccatgctacctgcctaattacctgtgggctctcttctgctgtgatgaaccccgcagatcatttatttatatgctgtgtaaacagcctgtttctcttcctatttgccttttctatagacatgtttggtttgtttctgagtaaagcagctttgaccaaatggactaaggggccatctggggctcacgattttgtatgtgatggacaaatggttaaatttttcagtggagtattacgcattctttaggctgtggtatcaatatgttggcacttcagagagtcagcaccatgtagtaagataaggaccagcagtggagctggggagggatgagaatcacagctcttccaccatttattactataacaaggtacctagcctgccttagcctctctaacctcatatgttagatgagaataatgttattcatgtgggagagtagaacggatgcagtgaattcaggtatgtgagcatttgatgtgcttgctgttggaatgtagttttgcagacaaggttgtttttgtcaggatgggtggtaattatatatataaaggtaacaaagctgattttcatctagttgaaggtctgtgtgagtggtttaagttcttggtacaaagatataagagacacatacttatgataattttatataaaatatatcatcaactgttatacagagatagttactatgaaaagcagaactaggagggaggaggacagaggataaatacagagtgtctgcctttcagatagctggactaaagaggaatgggaaattagagggaagaagtgtctgatgtttctgcagccagtcaggttgtgctcattgaaaactgtttttccaaacaacctcattaaaaagtgggcaaaggacatgaacaaatacttttcaaaagaagacatacatgcagccaacaagcatatgaaaaatgctcaacatcatgaaccattagagaaatgcaaatcaaaaccacagtgagatactatctcacaccagtcagaatggccattattaaaaaatcaaagaataatagatgtcggcatggttgcagagaaaaggaaacgcttctacactgctagtgggagtgtaaattagttcggccattgtagaaaacagtgtggcaattcctcaaagaattgagaactaacgttcgacccagcaatcccattactgggtatatacccaaaggaatatttgttctatcataaagacccatgcatgcatatgttcattgcagcactattcacaatagcaaagatatggaatcaacctaaatgcccatcagcagtagactggataaagaaaatgtgatacataaacaccatggaatactatgcagccataaaaaagaacaagatcatgtcctttacaggaacatggatagagttggaggccactatccttagcaaactaacgtaggaacaaaaaaaccaaataccatatattctcacttctaagccggacctgaataacaagaacacatggatacaggaaggggaacaacttgagggtggagagtgggaggagggaggagggagaagatcagaaaaaatgcctgtcgggtactatgcttattatccaggtgacaaaattacctgtacaccaaatccctgtgacacagtttacctatataacctgcttgtgtacccctgaacataaaagttagaaacaaaaataaaaccattttttgggggacttgagctctaagttatgaatattgtcttagggggctcagaggtaaagggacagcagcgtatctttaagatcaagcatgattttgttactaatagagcctctgtcctaacctgtacttttgggggttgacgataccagagtaatttttctgtgcattttctgtgtgttggtttgccctgtcttcagcagtgattatgtatttctgtaagttaataggtccctttgtgtggggcctgccccctgtgtggaatcatctcatatggagacatgtcctggaagtgtcccagaagcccctagacttgagttttccagactccttggccaacaaacacggccctcccctggggactgtggccatcaccccaccctgcaactgcctggcctcctgtggtagaaagggaagatgaatgatcatcagcgctccatctgtctggatcggaatgaacaaatctcttgctgcttctccgtcacgacccttcacctttctttctcccttggctagatggcacccctgagctttggatttttttttattataagaattttctaacttgcatatttgcattttggcctgcattctcaaagataatgatggccatgaccctagcgaggctaccacaggaaccgtgttctcctcaatcgcctttccagggagctttctttccctgcaccgtcagtgccaagggaggctgaaaatgcagtgactgtgggttatatactgtgatggccccagaagggctgtgactccatcacctcctgtaatcctcacagggtccccactcatgagaaaagggggaggcttctaggggttatggatagtccccaggtcacacagctggtaagaccaagtccattgttgatctgactctggacggaagggaagggccatctggtctacctcatcaccacctccccaagccatgggaaccacccttgggtaatttgggaatctagaaaaacagcccttcagtaaggaatgtgagttactgcaccacaaggtgattgcccctactagtagaaaccttactacccagagctcagttgggtttcatgaccccaaattaaatgaaatataatacaggtaaacaaactttataaaattattccaatgctttaatgctctggcctggggacctaattacttttattttattttgttttatttttaagatgagaatctcgctgtattgcccaggctggtctttcagcctggcctcatgcaatcttcccaccttggccttctaaaatgctgagatgacagccttatgccaccatgcccagccctctagccaattttcaataaacatactgaattttcgtaatatagtgtctaacattctctactgtgcttttaaaaccagtattctcaaaacagcttattttattttgctcgagacaagtgtgcattatccctttttgcttcccacaagagcaaaagcttaagcattgtcttcccttcacttcctgccagcgccccatcatctccatctgctggggtcaccgggattcgaggctgttgatggcatcaggaccagccctgtacgtggtgcgtgtggagcaccgggtgtccagcctgcagctgctgtgccagcaggccatcgccagcaccttgcgtgaggacaaggacgtcagcaagctgactctgcccccccgcctctgctcctacctctccactgccttcatccccaccatcaaggtaaagccctccacccctccctcttcctcctccctcacctgtgctggctccccacagagccagggcagagacaggtgagggtaccagagtgagcacatggggccatgtgcagctgtgcaggatcctgtcatgtgctgccaggtctgcagtctgtcgaagcatcatggtccatgtccatgagagatttgccctgtgtggtggctgttatctttctcatggcaaagctggtattcctggacttctgtgtccctctgatgatcaaaggagtgaccattattcagcatttcctatatactaagcattgcaccagttaatttttagaaatctgtcttgttcagtcctgacttcctgacagatgccattattcgcatttaaggaagcaggaaacaagttaggagaagttaagtaacttgctccctagctggttagggggacagtcaggattagacccaccccagttctagggcctgctctcagcactgctgaggagggccactccagccagcactcagcgtcagccaccttttataccagtgggaactctagaaggtagcatgtagaatgcatctgccagttgctgttcaagtgtgggtccccctaaccttgggttttcccaagtggttctcttttatattctgtctctcttcttctgagtagcagacccatttgttggttacttttttcctgaaacatcaaagttttagaatctgttgggttgtttttttttcctaagttgccttacactattgattctacacgagcagatctcaacaccggtgtattatatagcattggaaaatacaggtgcccaaggctgcccctgtggatcctgatttcattgtctgatgtgggatcctggtttagatatgcttcgaaagcttgcaggagattctcacatgctcctaccattgcaaaccactgttctacaccacatagttaccctcttccccaggcccccagcctgtgctctgtctggaacagtagcgtttttagttgacctgcccccgtgcccactctctttccctctctctctgcctctctggagtcccagctcttcattttcttcctgtatcctccagcccccaattccagatccgaacaacatgagagactttgtcagctacccatcagccggcaacgagcggctgcactgcaccatgaagcgcacagaggacgacccggaggtgggcggcccgtgctacacgctctacctggagtacctgggcgggcttgtgcccatcctcaaagggcggcgcatcagcaagctgcggccagagttcgtcatcatggacccgcggacagatagcaaaccaggtgggcccctcacccgagggactgggaccttgttctcctgtggtcatgggctgttaacgccttacaccccatgcaaagagaatgtctgctaatgaaacgtgagcctgtgggggctagtgtggaacatccttgaagctacgacatttccagaatcccattgaaatgaacagttctctaaatgtactttttgacaggtttttaatcatattccatgggcagtggatagctgggcggtggatagatgaaccaggcaaggggaagttggcgcagtcctcctgggagtgagggtttcctcttcacagttaccgagtattcatcgagtgccttcatgtaatattgagacaacttgaaaataataacaagatacagtccctaccctcccagagtggatgataaaattgaaatcaaaccttcagcctcctacccctccctagtctactgttaactgctttttacctgattgctaatgacaatgttttgctcatccataaagatgttggtatgagtcacccttttcttctaaaaacctttccctgcagtgattttcattgctcagttaatgtattcaagatgctccctgcacatctctctgggatcctagattgtaagcttcagagggaagggactttgttctttttttgtgccacttggtactaggctagtgtccgtgcacccatcagtcactgccagctcagtctgccacctccctctgaaactttgcccatcacctatggcagaacgaacagcacgcttagtcattgtgctccagacgctgccccgctgaatcctgtgggcctggggggagagaactgagtcatctttgtgccctcagtggatttggatttgttttcattagttcatgcttcctctcgccacttcctcgctccagtttactctcctgcccattagtctggtccctgcctctcattacgacctggagctagcatgacctgtggcctgaccagtcaccccaagtcacagtgtggtgggcttgctcactctcaacttgtactcagcgctgtacacaggtgccccacctctgcctgccagccttcatttgttcagcatcggcagtgacactctactacccctgcaaaacagcaataccacttgtcaatattagatattagtccgttttttctgtcttttgactcgtgacaagctagtaccaggaacaaagaaagcaactagcagaattggggctggtagggaggcagactgaaaggagggagaggacagattcaggaggaaggaaggcacagtgggaaaagcaggagagagagaagcgcatgttcacgtgggagggaaacatggtttcagggaaaaggagaagggccaccaatggttagagatgactggggtgggggccgtgggacaggccctgagcccaggtttgcagcagatgttctcactgatgtcagtacctctaaggttactcccctgggtacaattttataaaatctgtattgagattaaatgttggcgataacttaggtgaagagcttatttcctcatgtgtgcataaattcttcactgaagaagacggaccggaggctgtgctgtggagtacccaaggactgggcttgcttgaatctgacccgactacgccaaatgcctgctcttccttccggttcatgtttatcagctcgtatcaaacacagacccactcatttgcgcacaatcctttcagggaataagatgttgtatttttataattaaaagaattaaaagctataaaacaaagcacattgacagatatttagtcagtgcctaccttgtgtggggtacttgagtctcctgctattattaagtaataccaggtcatctctgcttttaaggagtttctaaacccttttgggtgataagacaatgtaagcacttgaaaagtttaattaaaaagtcaagatttaaatacctgatgacaaaaatagaggatatgtcacaaggcacaatataactaattgcacctgaatggcatatataaactatttcagaggtggaaaagagtccctgacattgagaaaacaggaatttcttttttctttttattggggggatggagggacagggtcttgctctgatgcccaggctgcagtgcagtggtgccattacagctcactacagccttgacctcccaggttcaagcgatcctcccacctcagcctcctgggcagctggggctacaggtgtgcaccacacttgctaatttttgtattttttgtagagacagggttttaccatgttgcccaggctgataaactcctgggttccagtagtcctccgccttggcctcccaaagtgctaggaaccaccatgcctgtccccaaatttcttatcattaaaagctgattaactcattgaggccgccatatcattgtttctcaaaatgtgttccatgcaccaccacccccatgcaaatcacctgggatgcttatttaaatacacgttcctaggcttacccttagattacgattcattagggctggggtggggcctacaaacatgcgacttaatgggtttcccaggtggtttttatgcactaaagtttgtgatccactgtcaagtgacttggcagatatgttcctcaaaatcaccagtgtgtatttttataccagataccatgagtcccagtagtttttttttttttcagacagggtctcacggtgtctcccaggctggagtgcagtagtacaatcatggctcattgcagccttgaactcctaggctcaagcaaccctcccacttcagcctccaagtagctaggatcgcaggtgtgcaccaccacacctggctaattttttaattttttttttatttttgtggaggtgggggctccatgtgttgcccaggctggtctcacctcctggattcaagatcctccagcactggcctcccatagtgctgggatcataggtgtgagccaccatgcccagctgcttccctccaccacccccacccattgttttttaaaaggaggcagggtcttactctgtcacccagactggagtgcagtggtatgatcatagtgcactttttttttttgtagagacagggtctcaccgtgtttcccaggctggtcttaaacttctgatctcaagaaatcctcctgcctcggtcgccaaagtgctgggatttacagacatgctattgcacctggcccacacattttctaaaggaatctttagccagagcttgctatagactgacttgtgttgccctaaaattcatatattgaagtccagacccctagtgtgaaggtaggacatttaggggagattaaggtaaaaggagttcatataggtggatcctgatctgatttagttactggccttaaagaaaagaaggagaaagagatctctcaccacgcacgtgcaccaaggagaggacatatgaggacacagcgaaaagacagctgtctgcaagccgggggcaaagccttcaccaggaagcaggcgttgtcaccctaaccttgagactgctcagcctccataatcgaatggaccagttatttagcgcgtgcgcctgtgtgtgtgcacgcacgcttgtgcgtacacacgtgctcttgcatacacacacgcataatactggttttgtttttctggagaaccctgactaatacagattttggatccaggaaatgggtattgctgtaacaaatctctaaacatgtggaagaagctttggaactgggtaatggatataggctagaagagttttgaggtggatgctagaaatacggatgttaagggcaattctggtgaggtcttagttggaaatgaggaacatactgaaaactggatgaaaggtgatcctataaagcagcaaaggatttgagtaaactgtgtttactgtttcatggaaggtagaacttgcaagtgattaaactggatatgtaactgaagagatttgtaagcaaagtgttgaaggagcagtttggttcctcctgatggcttatagtaaaatgcaaaaggagaaagatgaatggaagaaggaattgttaagataaaagatgaagatttagatttagaaaatatttagactattcatattgcaaaaaataagtattaagtacattttgaagaaaataccaaagttatggctggactctcatttgataaagcgcttatgaaattatatgagcagagacactgccagtttgaactgtagtggatggaaacaggatgaaaggaaggagagaggctgttggacttcttagctttgaccagctgggatgatggagctgtttggccactaacatgcactattcttcaagaagaaagaaaaataaccttgaaagtgattcagagatcattaggtccacctcctcagtttcagcaggccagatggcctttgcacagagccttgtgggcagagccatgggggcaggatccctgccagagttaggagggtgatgctgacaccccagtaggcctggaggacaggatatcaaaccaaagaagactccactcaagcctcaaaattcaatggaattttctttgcgagatttgggatttgcttggaacctgtcaccactttcgtacttccagtgtctcctttttggaatgggaatgtctattctatgcctgtcccacaattgtattttggaagcacataacttctctagtttcacaggttcacagctggagagcagttttgcttcaggatgaattgtacctcaggtcccatccatactggatttaggtgacaatttaaatgagattctggactttagagttgatattgaaataagttaagactttgggggttttgggaatagaatgaatatattttgcatgggagaagaacatgaatctgagagtggccaggagtcctgtggactgaattgtgcccccacgtcacccccaaaattcatattgggaagtcctgactcccaatgtgactgtatttggagttaggacttacaggggggagttaaaattaaatgagatcttaagggaggtcctaatctgataggacagttggccttataagaagacaaggactaactaacgcctgtgatcccagtgctttggaaggccaaatcacaaggtaaggagatcaagaccatcctggctaacaaggtgaaaccccatctctactaaaaatataaaaaattagccgggcgtggtggcgggtgcatgtagtcccagctactcaggaggctgaggcaggagaatggcgtgaacctgggaggcggagcttgcagtgagccgagatcgcgccactgcactccagcctgggtgacagagcaagactcgtctcaaaaaaaaaggcaaggaaagagctctttcttcatgcacatacactgagtagaggccacctgcaagccaggaagacagcgttccccagaatctaatcattctggcgccctagtcttggactttcagcctccagagtatgaggaaacaatttctattattggagccacccaagtctgtggtattttgttatcgtagcctgagcagatttagagtgtatatttaaaagccattaaaaccgtttttaaagattttattttaaaaatatatctaattcaggaagctgggcacagtggctcacccctgtaatcccagcactttgggaggccaaggcgggaggattgcctgagctcagtagttcaagaccagcctgggcaacacggtgaaaccctgtctctactaaaatacaaaaaaaaatggccaggtgcagtggctcatgcctgtaatcccaacagtttgggaggccaaggtaggcagatcacctgaggtcaggagttcaagtgcagcctggccaacatggtcaaacctcatctctaataaaaatgcaaaaattagctgggtgtggtggcaggtgcctatagtcccagctactcgggaggctgaggcaggagaatcactgcctcgggaggctgaggcaggagatggaggctgcagtgagcctagattgcaccactgcactccagcctgggtgacagagcaagactccatctcaaaaaataagtaaataaagaaaatacaaaaaattagccagccatggcagcatgcatctgtagtcccagctactcaggaggctgaggcaggagaatcgcttgaatccaggaggtggaggttgcagtgaaccaagataatgtcactgcattgcactccagcctaggcgacagagcgagactccatctcccaaaaaaacccacaaagccttcaacccagaagaaattagcagattcttgaaaactgacagaattgagatgtaaagccccagacattgtagttaagccataggttctcaaagaccagtcccagcttacatttttctacgacttagatgtttttccagaacagccatgataaattgatgacacagaatctctagaagtatgaagtagacccagccaccacctcagcctctgcaaatgtggagcttatgtcatgcactgaattgctagtcgtgctgatgacagacgtcagagtggcaggcagtgcctgcacgtgtggaattgtaacactgaacaagcagggctgaggacatgttttcagaaagccattttctttgtctcatgccaccccttaaatcgtcatttattctttcagaaagtatttatcaagtctcaggtattgttctagtctctggggttaaagcaggaggcaggacagattactttccttcccttgtggagtttgcagtagttggggagacagacaataaaatagtagttatggccaaatgcagttgctcagctcttctaatcccagcactttgggaggctgaggcaggaggatcacttgagtccgggggtttaagacaagcctgggcaacatagtgagaccctatctctataaaaaagaaaatagtagttttgagtgaagggatagaggaaatggtctgggacatggtatttgagggttcctggcattgatgagtgagtcaggagctgagtgggcagtgtcttactgggtttcctcaagtcgaatcacacacacaggcacattctgtaggcttgcatgcatgcttgagtcatagctgagattcctttgatccagtgattcctaaattaagtcatataaaacactgctcaggacttgtgcattaagcctttttatttgcttaaacacaaataccactgtggcttcactgtggctttcgctgggtccaggcgtcgagcctcctgattcagtgagtgctttaaaaagggggtgatgtgggcgacacaacctggggccagcctcctttccaaggagcttgccaagcttttctgcctcagaggggcccctgttcacagatgccacctccaaatgctcagaaacttctagattggtttggattaagaaactcatcctttaaaatataaacaacctttttggatggtaagatcactcacattatgaattatttcattgtgattgaatgatacagcttttatttattacctggcaaggcacttggagccttgaggcaatgagattttcatcagaaaaacaaagtaatctggaagaatggggtcctcacattgaggacagacctggggcagtggaggggggtgtgtgggggatttgggtggtgaggggatgtgatagcacaggtggggatgggcagcaagggagaggaattccaacgaagaggaactttgccccacagttttgccatcatcccactctgcacatcatctcaccgtctgcctgaaggccccatgcggagtacccccagaagaacccagagccatcctgggagttcccaccgcacaggtttcctagcctttgctccacgcaggcaagcagctttaccaggcgggagagccaggcccccgccgcaagacctgtggcaattccaggggactttctgactttccagacctaagtggaggggacctgactctgtcaggactgtagttcaagcaggcttggcatccgcaagggccttctcaggtcagaagcaggttctcaggggaatcagtgagcccgcaagaccctcagcccaggttctgtggctgcctgaaagtccgcatgaacccaggtgggcacctgtgtgttgtgagacaacagcacagccattttgttttcagcttttggcaaatggtgtctatttcgtacattcctagaaacattaaaataccatgcccattttgacaacagtagaagtaattgcctccttctgcttagaaaatgtaaaagagaaaaacaatgccaagcttctttttggtttcaacctctaggtctaaaatgatggcctgtggagtccgtctgtcttttagtttatagtaatgatcattggtaggggctaattgatataacttcccttgaaatctgctggttggtgttttaccagatgaaatctatgggaacagcttgatttctactgtgatcgacagctgcaactgctcagactccagtgacattgagctgagtgatgactgggctgccaagaaatctcccaaaatctccagagctagcaaatcacccaaactcccaaggtaatctcagtctttggggagatcgtcctttcttgtgcctctgaatatgtgtgtttgtgcctgcaacagaatcgcattgaaactgaccagaagagtcaaagagcaacctccctgccttttcttccagaagattccagctggaataattacaacttctatttgttttgttttgtttccttcgggatagacaaagatacccagtagaagtttgctacaccctcagaacttctctaggggttagcagtgatggtgggtggcagaggggtggccatagttcccgggcttatatgttttttcttatagtttgagaaaaggaagaaaaaggttcccctgtggatgtaacatgttgaagagaatgccagataagatgcctgtaatgctggagccgggcacagtggctcacgcctgtaatcccatcactttgggcggccgaggcgggtggatcacgaagtcaagagatctggaccatcctggtcaacatggtgaaaccccgtccctactaaaaatacaaaaattagccaggcgtggtggcgggtgcctgtagtcccagctactcaggaggctgaggcaggagaatcacttgaatccgggaagtggaggttgcagagccgagattgtgccactgcacttcagcctggcaatagagcaagactgcacctcaaataaataaataaataataaataaatgcctgtaatgccgtaattgggaaacatcaacacatcgcatccactgtagaacctttttcttcactaagatttctagttttaattctgtgattttttttctgatgccatgaaaaactaaggtataagttacatacagatacacatctgtccaaatcgtaaacacctagctcattgtacaagggctatcccagtgtcttcccccaagttcaagataaaagacatgtcatcatcccagaaagtctgcctgtgctccctccatttgatacccattccctagaagtaatcactcttctgacttccatcatcagctttgcttgttcttaaacttcatatgatatgtcaaacgatatgttccctttgtatctggctctttttttttttttgctcagtgtaatgattttgagagtcatcatgttgttgcatgtatcagtagtttgtttttctttattgctccgtggtattccattgtaatgattatactacaattagtttactctgtttaccaatcaatggatatttgtagtttccagtttgaggctattatgaacaaatccatgataaacattcttatacaagtctttttgtggacatgtgcgctcatttctcttggatataaacttgggaaaggagttgcatggtcatgggtcagatacatgttaaagtttattagaaactgccgagcagtattccagggtagccgcacccacgtaaatccctaccagcaatttccaagagagtcccagtttcttccatcctcagcagcggctctgttgtcattttttagaaataattctaccttgttctgataggtgtagtggcatctcatttcagtttaattctgatatctccagtgatggatgctgcttcgtttgcatgtttcttggccacttggctgtcttcttcttttgtgaagtgtctgttcaagtcttctgcccaatttattattgggttgttttattgagttataagagttctttctttctttctttctttctttctttctttctttctttctttctttcttttctttctttcttttctttctttctttcttttctttctttctttctttctttctttctttctttctttctttcttgtctcgctctgttgcccaggctggcgtgcagtggcatgatctcggctcactgcaacctccacctcctgggttcaaacgattctcctgcctcagcctcccgagtagctgggactacaggcttgtgccacatgaccggctaattttttgtatttttagtagagataaggtttcaccatgttagccaggatggtctcaatctcctgacctcatgatccgcctacctcggcctcccaaggtgctgggattacaggtgtgagccactgcaactggcccaagctcctgtgtaccctcccctccctttagagcaatcactacaggggcatctgaatgtctcattcttttttgttgttgttttttcgagctggagtcttgctctgtcgcccaggctggagtgcagtggcgtgatcttggctcactgcaaccttcacctcctgggttcaagtgactctcctgcttcagcctcctgagtagctgggactataggcaagcgccaccacgcccggctaatttttgtattttttagtagagatggggtttcaccatattggccaggatggtctcaaactcctgaccttgtgatccgcccgccttggcctccctaagtgctgggcttacaggtgtgagccaccgcacccagccaagagttctttcttctagatttgaatcctttgtcagatatctgtatggccatatagtccagcacgtggcattcttcttttgtggttagtgctttctgtgtcctgttcgggatgtctttggttacctaaggtcatgaagcctttcttcagttctcttccagcagctttctagttttagctttcatgcttatggattaatttttgtgtttggtatgaattagaggtaaatgctcatttttaaatatgcagatatccagttactctagcaatctgattgatgtcttttttcatctttgttccagagcttgttaaaattgcatgtaacattatgaactttcctatatttccaaagtgcttttttcccattatgtaagcagagaggacatctaatgcatgcagctaaatccttcacctttaaacgtcctcttcaggttgccgtcttcctgtggctggacctcctcctgttgtcctttccccatttggaccctccacacagcagccaggctaattgtcccacatcatagctttagggagctcaatctgccatcctcccactcctcaggagcccagagtttctcatcaagctcaaaaccagtatatatgagacttaatgcattttttcatagactgttttaaaccttaccatactcattttaatcacactgtctttggggtagactgtcattaaacatgtgtgtctccatgttacaaataaagggactgagaagcagagatacaacatgggatcaaaaggcagccaaaaaactttactaatttgatttaaatattgcagatggtgaaatgctagataaatttgttgaaattcacactgttgcagaagaaattataagaatcactggcattagggtaagaaatgacttgttccacctgccattttcccaggactgattgtgcaggcccctggcagaaggccatttccacgcttgctccaaggcaacagagagtgaaagacagttaattctttgagttccttacaaatggatcgctggatctcatttcagtgtatactaagtatattttgagatggggtcttgctctgtcatccaggctcaagtggagttgtgtaatcgtagctcattgcagccttgaactcctgggctcaagcgatcctcctgcctcagcctcccaagcagctgggactgcaggtgtgtgccaccacacccagtttctcaatatattttaaaatgtatattattcaatgtaaagttgtcattctttcctcatattcataaagcaaaagcaaggggagagctttgttaaattcgggcactggctgcagggtgagaacccaacacccaggctggctgtccagaaaaagaaaggactgctggagtcagggccatgctcaccattcccgccacggatgcctgacccctcctggccttgcctccccaggatcagcattgaggcccgcaagtcacccaagctgccccgggctgctcaggagctctcccggtccccacggttgcccctgcgcaagccctctgtgggctcgcccagcctgactcggagagagtttccttttgaagacatcactcaggtaggagcccccagttaccctgccttgctcccctcctcctgggggctatgcccagagggccccttcctacccgccgcctgcactgctcactgccaccatgggtccctgagctctgctccacatcctgcacaccacctactacctcaggagtagccctcaggtggagctctggcttctccacctgtgcccctcagccagttctgatcttgcagtgacggtgggagagaacctcccacttcccatcacagctcccaccgtccagccctgcctgcctttccctcctggtccctcagtgccccctcaccctccgggtgctgcagccacacctggttctcacctgtcccatgccttgccctgcctagattgtcaccaccccacctcctcctcgtttctgccccatgcttccagatggaactccaccaccacctctgctgtgacggcctcctaccctggtttgccgggagaggctgacacacctggtgtagagctaccttatgacattgctcagtgacttctttatatacagatcattacaagctttatctcctccatcaggtttaagctccttaaggggctgtattttgtccatctttatttttgcccttgcatacataccttaggcaaaataatttcttaaatttttaaaaatttaattgaatgagaaaacaaatgatgggtagtttcaggacatactggtaccaatgcaaccgatgttttcaggcgaaatatcaaagataaaaatggattcagagttagatccctttctacgcctctttaaatcacacacctgtggacatacatactgggacacacccccacctttcccccagctcgatgcgcccccactcactgctgcgtgcctggctgccctcgttagcttctgatcttgcaaatggtagatgaggtagggaatgggtgtttcttgcagtgcacactcgtggcttaagtaataaatattaacattcttactgagtgaccagttgaaaatacggaaatagattgtgattcttcttttttcttttcttcctaccgcagcacaactatcttgctcaggtcacgtctaatatctggggaaccaaatttaagattgtgggcttggctgctttcctgccaaccaacctcggtgcaggtaaaaatcatgtcctcttctctcattgtcccagttggaacaaactaaaacgtccagtttccacctttagtggcttaaactaggagatgaacttttaagacagcaaaagattagcatgtattttacctctaaaccttaacttcaccacagtgatttcacaaaaattagaattctcactcacattggctttttgccagtggcattttttttttttaaatcttttaactttttttttgagatagtgtcttacccaggctggagtatagtgacacgatcacagctcactgcagccttgacctgggctcaagtgatcctcctgcctcagcccccaaagtagctgggattacaggttcgcgccaccatgcccggctaatttttgtattttttgtagagacagggtttcaccacattgtccatgctggtctcaaactcctgagctcaagcaatttgcccacctcaaccttccaaagtgctgggatgacaggcatgagccatcacgcctggtcgccagcgggattttcattttttgctataagccctgactcataaaaacaatagaaatattaaaatgatagcaatagccaaaatttgtatcacagctcgtatagatttctcaaaactttgacttctaggccttttgctgtgggcggatttttggtaaactcctgaagaaagtggagaagaaagcattagagactataagtagttagctaaggctgagtgcagtggctcacgcctgtaatcccagcactttgggaatacaaggttggcagatcacctgagtttgggagtttgagaccagcctgaccaacatggagaacctttctcttctaaaaatacaaaattagcctggcatggtggtgcctgcctgtaatcctagctacttggaaggctgaggcaggagaatcacttgaacccagggggcggaggttgctgtgagccgagatcacgccactgcactccagcctgggcaacacgagcgaaactacgtctcaagaaaaaaaaaaaaagattagctgactattggtacaattcttggtggtaaatttttctgaatttcatttctcagtactagataaataccctgtccatggcaagtttgaaacagaggaaaactgagccaagggagtaaaagccaggccagaacatgaacatgtattcggatctgccctcctgcccaaatgagttgcaataccttgttatatttaccccagagacagtaatgacgtgaaaatggcagaaggtccattccagagcaacttccttctgttggggaggtccctatgtgagttgaggagctgtgttgctccccgcatctttcccagttgcagaatcactgcatgtcgtacacgtctgtctgcaaggccagctcagccaggggggccgtggccctccattttgagcgtgctgtgcgtaacctactaaaactggtttttgaaaaattctgaatctgtgtatgagttgtatgaagcagttcatacacagatcctttaaaataaattattcttacagattagatgttagaaagacctattgctatgaggcatttcacagattttttaaatagtgctgcatttgagtttttcattttgaagtttctgagctcaaagaaaaagaggaataaaatttaaacatgaaactgacttagggaatcacaatggaccatccctgtacataatgcaaataaatctctcataatattttcagcaacctggaaacactctgatgaccacaaatgcttgttgttcagttactcgttagtgccctattgattagataaggctgatttttaataactactgtttagctatcatgattattcccacatcagtaagctgagaacttagccatctgcctatggtaaatattgaaaaagggaatggaagtgagaatttactaaatgggtcttttcattcttggatgttgagaaggtccacagataagccagtaaagatcttacaatgagagagcatgtgagagcctttgagacaaatgctggccttttttggggggtgcagggagatagggcctggctctgtcacccatgctagagtgcagtggcgccaccacagctcactgcagcctcaagctcctgcgctcgagtgattctcccacctcagcctgtactagctaggactgtagacaaggcacatgccaccatgcccagctaattttttaaaatttttggttgagataggacttcactattttgtccaggctggtcttaaactcctggcttcaagccatacccccatcttggcctctcaaagtgctggaattacaggtgcgagctaccatgctcatcctgatctttttaaaaatagtattttgatccatagagctactttgtcaaggtaaaagaattttccacttgattctattaatactagagaacagaaattaactattgaatactagaaggtatgttatatgtggtaccccattaaataatcttttcaaagacagtatatggcactctagtgaacttaaaaagtgagtgctgttccccaggttggataatttgttttctttaattagaatgatctggcccatgaaatttttttattttgaatttttggcattttaacaatacacagtagattctacaaaattcaaagcattcagaggggtctatagtaaaaatctctgtcattctcaccatcagccacctacttttctttcctggaggtaactgatggtatttttctaatccctcctagaatttttttaaaaattgctttgtcaatgtgaacaacaaagaataacactttaatacattcattcttaagtcatatggaaccacacagtatttttaaaccaaaattcatattatctttcctttgtggacaagagagagaaacacatgcctagggcctttcctgctattgggcaggagaagttaccttaacccataccagtccatgggccagccccgcaaagatgcttcgacaaaggaggcctgctgtgccgcagtcatgctgcaggtcagccgctaagtgttaaggtgaccgccatggagctagaataaagaagctttgtgctacctgtctcacaggagagactattgaacacaaaagcaagttcacagggcagtttcaccccgactttaactactgtgaaacttaaattcagattcattatatttaaacttattttgtctcctctaaatattttagttgcaatctaggccttctcctacatgtccctgttaatcaaattaaatcttgaggttttaaaaaaacaactgtgtggaaattccctataaatctctatcctgatggttagattaaaattgaaagccagtaaaccaaggttccagccgaaatgaaggctatgttttattcctacatgaaaccatgccacccccatctcaacattgctttcacacagtttcttggttgcccaagcttcccttgtttggcagtctggttgtcacaactatttccattcaatcatccttctgactgcaaatgaggtttttaaaaaatatgtttttataccctagcttattccaaaagaaatgatttgtgtctaaaatgtttttaacatttgaaatttgtagttctgtagacaaaccattggcaaggaggccaagctagaccgggaatctgctgttactgaatccagaactgtggctagtatggtcgcattgagtactagggagaaatgaagagctcctctcagcctctgggccctgcctacacagatctgtcttctgatggcagggaaactgcagtgcgctcttcttcctgtgactctcttgacactttggctctgctctggtgtgtctctgttaactgtgcccttctttttccccaccagtaatctataaaaccagcctcctgcatctccagccgcggcagatgaccatttatctcccagaagttcggaaaatttccatggactatattaatttacctgtcttcaacccaaatgttttcagtgaagatgaagatgatttaccaggtgtgttcacatacatcaacgtgtttgtcacggtccctctgtcagtagatcatgcaagggggacagagcggcaagttgttgaggatttcagtctgctacctgggtttggaaaaggtatccctgcctcagtaaggttggtagatgtgatgttgtgtcccaggggaaaagtcacaggttggcaccagtgttggcaggaggggagctgctggagcacagatggttccagtagcagcggcgccttgtgttttcggagcacagttctaacatctggctttatcctcacagctatcctcttagtcttgtgtctggattcagataagtttgcaggactgattgggactaaataaaatcagaactgagactcaatctcattgatctaggccagctttcatcctttcagtccctgctgagatagtgtctcactccagcattcccgtggtgcgcacagagcccagtttctcaaatctgccgtgtccaggacgcaaaagcctttacctggaactacctctcttccaccgcaaccgcatgtctcagtgcacaggggcctggtctgagttcaagataaaatctggtaaacagtttttaaattccagttttcaaatggtaaatatcaatatccatagcatcttaagttaatgtgtttcccagtggggggattcttaaaggatcctattttgattaatagattacaatgacttccaattagtctggccagttagttgtgtgtaactatttcactagagggtacttgaaaataacttgcttttctaagtaaaaggccacctgagattttatagatacacagactcctctacttccaactaagtgggctctggaagtctcttgtttctgagctagaggaacccagacatggaccgtgacttctccagtatctggatgtctgtgaccagagggactggttcttgcagtggacatagagggccacccatttcagcttgggccctcctcctcagcttggctctgaacttgagagagttgtttaccttctctcagcccagtctttttaactgaaaaaagaaaaaaaaatgatttatactgcactttccaacaatagccatcttgcttctctgttggtgacctctcctgcatgggtgagcaaatctcctaggcttatgtggtcctaataggccaagcttacagccacataaatacctgtagtttggtgaagcctcccatacctgagctttctagtgcatccccttctacttcagaatcttggaattagaagtatcttttaaactttccccttaacgctttccctgttctcccaaaatgcgaggaatacagccctctccaaggttcagctgttgctgcagttgtcgttattgtctgtggttctcaatgagaggagggaacatattgtctcagggattacatttaatgatggtgactcagtgaagaggctcttcttccttaaaggggaagatgcctgccatcagtgtttcatacagacgagagagcttctccaagagggatctgaacaggaatcataggaaacctgagacagacccaaatttgtgtggccaggggagagttatgtcttactaggacaccccaaggaagggccagcttagcttttgataaactagctggcttgattctgtagttcttttgatgagaagtcagccagtgtcacatttcctaatcatggactagctgccacacggtacttacaccatgcctcagatttctggatcagtggcagttttctctaagggaaaagccacagggtagcacagtgggcctagaggagccaactgcagagtgctcagtgggcactttaaacagggtggtgcagacagtggctctgagcacctgtctgtagatcgctgttcaaatgcacgcacgctctgttaaactctcactgtgtacaaataggatatatttatagggtttaattcagcatggctctaccttacatactgtttgaaatgctaaaaagcagataaaggccaggcagggtggctcacacctgtaatcccagccctttgggaggcgaggtgggtggatcacctgaggtcaggagttggggaccagcctggccaacatggcaaaaccccatatctactaaaaatacatagctgggtgtggtggcgctcacctgcagtcccagctactggggaggctgaggcaggagaatcacttgaacgcaggagaatcacttgaacccaggaggtggaggttgcagtgagctgaactcctgctactgcacgcctgggcaacagagcaagactctgtcttaaaaaaaaaaaaattaggaaatgatccttcatatgatactcagattcactagaagattcttttcattgttttttctaccacattttacatggttctatttacagaaacctaatgtgcatacatttcttatacacatctgttgcatgacactttccacactatccatcccataatcatgaatagacctattcagaggcctaggcactgcaagtcctcaatggaggtttttcctgtaccattgccctcttcttgcataaaagggtgggtattttatgaatatcaccagtaaaaagcttcttcagacatttaattatctgtgatggtgccattgaggcactggtgccaagtttagaaggttcaaaagtgagttagtcgaaaagttctgacagtacccttagctaacagacagcagcaggctgccctcaagaacccatctcccttgtgcgagcaggccagctttccccaagcagacacgtctctgtctctggcaatttgcattttgtttacagaaggagactggatgagtccagacgtattgcttatcctgatctggtttaatggcagtgtttttgtaagcagttcctttttctaattttcttccagtgacaggagcatctggtgtccctgagaacagcccaccttgtaccgtgaacatccctattgcaccgatccacagctcggctcaggctatgtcccccacgcagagcatagggctggtgcagtccctactggccaatcagaatgtgcagctagatgtcctgaccaaccagacgacagctgtagggacagcagaacatgcaggtgacagtgccacccagtacccagtctccaaccggtactccaatcctggacaggtgattttcggaagcgtggaaatgggccgcatcattcagaacccccctccactgtccctgcctcccccgccgcaggggcccatgcagctgtccacggtgggccatggagaccgagaccacgaacacctgcagaagtcagccaaggccctgcggccaacaccgcagctggcagctgagggggacgcagtggtctttagtgccccccaggaggtccaggtgacgaagataaaccctccacccccgtacccaggaaccatccccgctgcccccaccacagcagcacccccgccccctctgccgcccccacagcccccagtggatgtgtgcttgaagaagggcgacttctccctctaccccacgtcagtgcactaccagacccccctgggctatgagaggatcaccaccttcgacagcagtggcaacgtggaggaggtgtgccggccccgcacccggatgctgtgctcccagaacacgtacaccctccccggcccgggtagctctgccaccttgaggctcacggccactgagaagaaggtccctcagccctgcagcagtgccaccctgaaccgcctgaccgtccctcgctactccatccccaccggggacccacccccgtatcctgaaattgccagccagctggcccaggggcggggggctgcccagaggtccgacaatagcctcatccacgctaccctgcggaggaacaaccgtgaggctacgctcaagatggcccagctggccgacagcccgcgggcccccctgcagcccctggccaagtccaagggcgggcccgggggggtggtgacacagctcccagcgcggcccccacctgccctgtacacctgcagtcagtgcagtggcacagggcccagctcacagcccggagcctccctggcccataccgccagcgcctccccgttggcctcccagtcctcctacagcctcctgagcccacccgacagcgcccgcgaccgcaccgactacgtcaactcggccttcacggaggacgaggccctgtcccagcactgtcagcttgagaagcccttgaggcaccctcccctgcctgaagctgctgtcaccctgaaacggccacccccttaccagtgggaccccatgctgggtgaggatgtttgggttcctcaagaaaggacagcacagacttcagggcccaaccccttaaaactgtcctctctgatgctgagtcagggccagcacctggacgtgtcccgactgcccttcatctcccccaagtctcctgccagccccactgccactttccaaacaggctatgggatgggagtgccatatccaggaagctataacaacccccctttgcctggagtgcaggctccctgctctcccaaagatgccctgtccccaacgcagtttgcacaacaggagcctgctgtggtccttcagccgctgtacccacccagcctctcctattgcaccctgccccccatgtacccaggaagcagcacgtgctctagtttacagctgccacctgtcgccttgcatccatggagttcctacagcgcctgcccgcccatgcagaacccccagggcactctccccccaaagccacacttggtggtggagaagccccttgtgtccccaccacctgccgacctccaaagccacttgggcacagaggtgatggtagagactgcagacaacttccaggaagtcctctccctgaccgaaagcccagtcccccagcggacagaaaaatttggaaagaagaaccggaagcgcctggacagccgagcagaagaaggcagcgttcaggccatcactgagggcaaagtgaagaaggaggctaggactttgagtgactttaattccctaatctccagcccacacctggggagagagaagaagaaagtgaagagtcagaaagaccaactgaagtcaaagaagttgaataagacaaacgagttccaggacagctccgagagcgagcctgagctgttcatcagcggggatgagctcatgaaccagagccagggcagcagaaagggctggaaaagcaagcgctccccacgggccgccggcgagctggaggaggccaagtgccggcgggccagtgagaaggaggacgggcggctgggcagccaaggcttcgtgtacgtgatggccaacaagcagccgctgtggaacgaggccacccaggtctaccagctggacttcggggggcgggtgacccaggagtccgccaagaacttccagattgagttagaggggcggcaggtaagacctcagaccaggtggcgctgcgagcccaggaggcgagggtttcagtgcttcggccttcaaggagcatttttcaaaaggccaaatgggaaatgtggaaaacaacgaacacctcttaggtggagctcatggggttatggtttttagtgtgcccactgctgtcttgtatttttttttttctttttgagaccgtctcgctctgtggcccaggctggagtgcagtggcgcagtcttggcttcctgcaagctacgcctcctgggttcacgccattctcccgcctcagcctcccgagtagctgggactacacgtgcccgccaccatgcccggctaattttttttttttttttgtatttttagtagagatggggtttcaccgtgttagccaggatgatctcgatctcctgacctcgtgatctgcccgccttggcctctcaaagtgcagggattacaggcgtgagctaccacgcccagccctaatttttttttttttagaaatgggagtctcactgtgttgtctagattggtctcaaactcctgggttccaagcaatcctcctgcctcagcctctcaagatgttgggattacaggcgtgagccaacgcacctggcctgcagtcatatttgtaaagaatacgtttctacttctgttcattgacttttctgtttttggcatcagatggtgacttcctaaggaatgtgagggttagttttgctcaccctatgcacacacacacatgtatgcacacagcttttccttccccattaaatcagtggtcactggttaccttgttatgctagtcaatagctgagccatgtattacggcttagttacatttccttttttgtatacttttcttcccctagacatatcaacttcctgttatctgtctgtttgctcatttgcctatttctctgtatatggaagtcattccccagttctcgaaccggatgttatctcatggtgcagctgaacacattgggtcctagttcttccctgctccagcccagaagggttgctctgtcctgctgccaacgtcccccttcaccatcctgtaaagtccctcccctctctacttaaattcacgttttcgttaattcactcaataaatgttattgagaacctgccgtgtgcctggcaatcctctaagcccagggttggcatactggcctttgggccactctggccagccgcctctttttggaacaaagttttattggagcacagccacgctcattcacctgagtatcgtccctggctgtgttggccggacaacagcagagttgaggagttgtggtaaaaaccgtgtgacccacaaagcttaaaatatttattatcagcccctcgcagaaagtgcgtcagcccctgctatagtgctaggatcagggcagtgaggaagacagagccccgccgctgtggaacacgcagactggggaccagaggcggatgagtgcagcccgtgtgctagggcatggcgtcactgtctgatgggatgtaggcacaggaactggtgaggaagtggccagcaagtccctccctgaggcagcggtgttggacagtggtggtgctacttctcttctggagcctctggcctgtttgtgtttctttctgcttttctttctcctttctacttcctaggtgaagaaaccacttcatttggcctgtagcattcaccccattcttttttttttttcttttttcttttagattcaggggtacatgtgcttgttacatgagcattacgtgcataatggggggtgggcttctagtatgcccatcacccaaacattggatgttgtaccccacaggtaacttttcacggatggagctggaggccattgtccccacattccaaaccttgctcactgtctccattgtgttaacatgttcctcagtccccttatttcctgcaaacttggagttagatatagaagcttcaccagattcagggtcacttttgttagcaaaagtatctcatagacggtgctgtctgcttccataaggagccatgcagacccggctgtcgccttgctcgccttgttcttttttttttttttttttttttttttttgagatgaagtctcctctgtcgcccaggctggagtgcagtggcccaatctcagctcactgcaagctccacctcccaggtttacaccattctcctgcctcagcctcccgagtagctgggactacaggcgcccgccaccacgcccggctaattttttgtatttttaatagagacggggtttcaccgtgttagccagggtggtctctatctcctgacgtcgtgatctgcccacctcggcctcccaaagtgctgggactacaggcgtgagccactgcgcctggccttttcaccttattctttaatgtctttgcttcccctgccctcctccaggtgatgcagtttggacggattgatggcagtgcgtacattctagacttccagtatccgttctcagccgtgcaggcctttgcagttgccctggccaacgtgactcagcgcctcaaatgaagagactggtgtggggaggagagagatgcagagagcctttggaagaggtcttcggagatgccagaggagccctctaggggtccgatgcctgggaggaccagaagccaacagcaaaactggaaaagcccggcaggcccaggagagggcgctgacctgtggtcgtcatttatttggttgggttttattaccttttattgtctgttcttcttttcttctttcatttcagtggcatttggaagcaaagagtgctaggcacctgctgttctttcaggaaacagcttggctgtggtaatgctctactgggcccttcagaatgaagacagtctgccttagagcctgctattcttttagacatagggaggatgcattatcctgtattctcctccaacatcaccactagcgtaaaagcaaaaagcttttacaaaacacagccaaaaattctcaagatgcaggttcttggggaatgggatggggacagcatttgatttacactgattatgttactccccaaaaggtgacttaattaataaagggcatttgggcagacacactgtgttggaccaacaaagtaggctctttacaggggtgttctcaccaggtagaaatgcgatttgctcactgaggatgttggggaagggacgaagggtaaagaagaaactgcacgtatacacaggttcacatcactctgcagacagcaatgtgactcagcgtgtgacttgtagcagcagtacgagggctacactcctctgctgaggatgtctacattgaaagcctccactagtttcatcgtttgtcaaagttccgtaggatcagtgatggtcattcagcatgactggttctgggagaaggtgagagacaaaaatggaaagatcctggcctgtggtagtggtagcagttttctcaaataatgtggtgacagtcactagatcctcacatgctgagaaacagcctctactctctctgccccttttactttttaatctggaatgcattactgtaaacatgatctttcccatgagataccatgttctatgccttcccattctaaaagtgtggacaacgcttgatttgaaaccactccttttctcctcttggctacattaaaattcagttgactacaaatgctttctatcaaattagaaatgtaaccaaaaaaatgttaagtgttcaccagggtattaaaatacagaggagtatggtcaaatctttgacaaaattttcatgatcttctctaacaaaaaaagttgtttattaactgtacagactgtttactaaggagctaaaccactgagaaaacgttattaaaattgtaatacctaggtagttggttgatcacagtttgttaattgtataaaaaaaaattacctagaatatctcttcccacttcctcgtcctcgtgagaacctgtgggcagtattcaagccctgatgacaaaacccagtgttttttgttgttgttttttgttgttgttttttgtttttgtttttgtttttctcagtcttacctgtgatgttgtttaggatcaggcccctctcctgggcctgctgtgcaggagcacaggaactatctgctggcgttgggttccaaatttgcattttatttggaaacagacaagtagaagatgctacagaaaagtattttcaaatttaaacgttttttaatcccctgttttagttaaaaaattggaaaagaaaccgacccatttttttcccagatcaagatgacatgacatcactcccaattctctccaaaccccagagaaatactgacgaagttttctgatgtggcaaaggatatttcccatctaataccagtttctcatttatatttaacgtattggacctgatatttttagtgggtgcattcttccagaaagaattcagcaatgttatcagaattaattcttttatatgagtttatgtagcttgatatggtgtttcagtgcttattggttgtgcaataatggttatagcctgttagataatctaaatgcaattcccctgttttgtcgtttaggagataattatttatcttgcttttcatagtgttcttaggaattattttgttgttacgttttggtgagttatacccattttatttatttagaaaaatagtatctttgttaacgacttacatggtcacagtatattttgctgcaagaaataaagaggatatgatagaaggtttttttttttttttttttttttttttgagacggagtcccactcttgtcgcccaactagagtgtagtggcacaatctcggctccccacaacctctgactccagggttcaggtgattattttgcctcagcctcccaagcagctgggattatagacacccgccaacacgccaggctaatgtttttgtatttttaatagagatggggttttgccatgttggccaggctggtcttgaactcctgacctcaggtgatccgcccgcctcggcctcccaaagtgctgggattacagacgtgagccaccactcccggcccatagaaggttttttgctggataatttgtaacttttctaattgggaaaaaattcctattaatcacttaaaaatttttttttgtattttgtgttattgattatatacaaaggagactttttttttgagataacactcaaatagtattctcttcttttgaaaattttatttttatctgaaaataacagttgatctgaaataaaaaggggagacctattagaatgagagtagccaaggaaagagttactaggtaataagcttcactttttgtgttctaattgtttttgagatataaagaccctgaaaaagcccattttagaacctgtttaataagagcaaatataggggaaaatctttgaaatgaaagctacaaatacatgtgagaagaaaaaaatggatttttttagcaaataattaactaagcttctaaatgcctagctccctcccccaaaggcgctttcccccgatggaggcacaggcttctgtctcggatgtttggcgcacgtgagtttgtatgagtttgtaccggagtgaccccggcagccactgcccacctcccctctacccaggggcctgaaaagaggggctgccctcctgcgccaaggcagacacaagctgcgggctgtgcggtcctagtagtgtgacgtttcagttaatagtggtggtcttattttcaactatgctttcattcagtcagtctctgttgactaaatacgacgaaaattcatactttatgcaggagatttctaaaaatttaatgtttattaatagtttatgaatatcaagatacctcattgaatccctaaatttaaaagcagtccagtaaaaggttaactgtataaagaatctatgactttttgagggaagtgtgatatattaacaaatataaccaattctaaatttgttttagctctaacctcatcaaaccaaaggcacagatttgtgtacaatatacccattgaatgtatatcctgagaaaaattggggccaaagaagcaggaaaatctcaaagctctaatggcagcataaatcaaagaatttcacaggctagtgtttttatccatagccattgctcccttgtcaagtgtctcacaaggacatggaagaatgtgttatgttcatcttgtaatcatagcaaaaagtctgcaaaccccagggtcaagcctgctctgccacagggttggatggtgaccttgggcaagtccctggggctggctaggcctccacttgtccatctgtgaaatgaaaggatcagcctggacagccctctaaactcccttacagctctcagcctaagagcgcagcactgaacagcctcatcattccacttttcatgggaaatatatttcacaccattgcctttgtgtagagaaatatttcttttcctgtgttaatgagctatgtactgaatataaaccagtgcatttaaagtaatatcttttgtgcacctctaaatgtgtttggaattgtgtttgttctcatagaatatacaaaagtactgattctaggtaagaaggagtctccacgggtgtgccctgctcagctggatgtccatgagaacagccatgaaataagtcactacttgtccccaaaaccacaggaatatatacctaggtcacctcaaattcctgagtgtgctctgccatgttacacggtcttcaaattgaaaaggtttcttgaaaaggaaagtttggcccagcaactggagaaggagtccatggtgtcgctgtgtgcctgtatcatttggccaagtcaatggttgtaagcaaagttagtggagacaaaaatgtgtccaaaatgtcgtttgagttcctgggatttctgtaatagcacacaactcagaactcttcagcatttgtgtgattccttacctctggctgataaaactctaatgggttgtggcttactttgtttccattttctttggctttgtgcaatttttgtgtaactttacttgtacctatattttctgtttacagttctttttaaggggaggggtagggttctaagatcttgttgtttattgtagataaaaattttttcgtgttgtagaaaagcatgggttatgcgtttgactgaaaaagacactgtattatttaccaaaggggtattgtttttgcatttgtttataaatgcattattttggtactgtaaatttggacataatttctgagtttattactactggcattttctttttcccttttttttttttttaaccgtaagtgcacgatgcaggtgcataggccccagaccaaactagaccaccagcatgttcatgtccagacctcggcagtggcgtgcactgcttgtgcacctcagttcctccagtgttggtttgtttgttttttaattcagcatcctgctggttttactttccaagcaagatctgttgcgactcccaaatgcgttttaatgagctcatccttatttgcctttcttcttacgtattttgtgtattagattgtgcaggagatattctagaaggcattaatggtttgcattcaaaacgatgtggtttgtccaagttattttctgtctttattactgagacggattaatctccttatttttttcttgatgatttgaagttgtaagagttgtccagctattgcttaataaaattttgcagatcaaaaaagttgtgtgcagaattcttgagccttgtgaggagaaatcacctcgctccattggcatgacctacccaccctccagttgcttcctgggtctcttggtaactgctagcagctactggagaccctgagatcccggtcatcatgttgcccatttggggaagtcagagattgtgctgtcttcttgatgatctggtttagatttgctttttcatggctttttaaaagaggactcgattggccgggcacggtggctcacgcctgtaatcccagcactttgggagcctgaggcgggcggatcatgaggtcaggagatcgagaccatcctggctaacacagtgaaaccccgtctctactaaaaatacaaaaaattagccgggcgtggtggcgggcgcctgtagtcctagctactcgggaggctgaggcaggagaatggcatgaacccgggaggcggggcttgcagtgagccgagatcgcaccactgcactccagcctgggagacagagcgagactccgtctcaaaaaaaaaaaagaggactcgattaaaagtgcacctgtatagcatctaaagatcagagatgccaaatattaacacctttgttaatttgtaggaaacttaaacctaggttttaagcaattcaactctaggtgctcatataactattaactattgttgttactcataagtgcttagtgagcctgcttcctctgccctaaagttccctatgaccatgggaggtgggaaggtggggcatgggaggtttatctgtgataatacatgtgtgcatgtacagaactacctttttggtgtttttcaaagaataaggaatcaattttgctcgaacctagctcccaaaactcactgtagaagagaaataactgtctcatggagattgcattgcagttttccaaggatgaaagatactaaccacagttaaatctcaactccattatgaagtgaataccttttgccactcctttcagaagaaaatggaagcagtgagaggttgaaatgatttctggattccatagacaaaaaccaatcctgaaacagaatccaagatttctgggtcacattaatgaatagacctggtttattcccagcttctcactctggtgtgtcgtaaagatttgcctgtaatgagctctgagctacttatacttagtcatctcccatgaaaacaagtattacatacagatgggccacccctgcccctcatcaggtgagctcatccgctttatagaatgagatttaagtccttgttattgaattctggaaagagtgaacgttcggctgaccagttttattattcacccaggcttcacaaaggagccagtctgtgtggatttgtttccctacacttcctagaaacagctgctctatgtgctgaagaataagaagccatccattggaagtgctggctcatttcttgaacccatttcagagttcctgtctgagcgatcgcttcaagtaaagaaggcgccccagagtaagtcataggaa

SEQ ID NO: 653 - DNA, 140597 bp, Homo sapiens
  source 1..140597: mol_type = genomic DNA
caatctgcttggacattttaggcttgagatgtttattagacactcaagtggagatgccaggtgccaggtgaatatgtgagcctggagttaatgaaagtggctgcagcaggagacataagtttgggagttgtcagcagatagatgacatttaaagctctgagactaaaggagatcaccagagaagcaaatgcagattataagagagagaggaggggagaagttcgaggactgagctttagtacttcaatattaagtgccaggaaaattgaggaggaaccagcaaaggagactgagtaggggcatccagcacaataggagaaaatctaggttagtgtggtaccctggaagccaatcattctaaggaggagattatgaaacatgggtcatatgtcatggataggccaagtaagatgaggactgggaattaattattattgggtagaaaagagatgccctcccccaggcatggtggctcacgcctgtaatcccagcactttgggaggccgaggtgggtggatcatctgaggtcaggagtttgagaccagcctggccaacatgatgaaaccccgtctctaccaaaaatataaaaaattagctgggtgtggtggcatgcacctgtaatcctagctactcaggaggctgaggcaggagaattgcttgaacccgggagatggaggttgcagtgagctgaaagtgtgcctctgcactccagcctgggcgacagagtgagactctgtctcaaaaaaagaaaagagatgccctcccttttgatgctctttaaacaaatcatgtataattaaattaaaactcaatggccaggtgcagtggctcacgccactttgggaggccaaggcgggtggatcacctaaggtcaggagttcaagaccagcctggccaacatggtgaaaccctatctctactaaaaatacaaaaaagtagccaggtgtggtggcgtgcacctatagtcccagctactcaggaggctaggcaggagaactgcttgaacccgggaggtggaggttgcagtgagccaagacggcaccactgcactccagcctgggtgacagagtgagactccatctcaaaaaaaaaaaaaaaattaggccgggtgcgatggctcaagcctgtaatcccagcactttgggaggccaaggcggggggatcacgaggtcaggagatcgagaccatcctggctaacacggtgaaacccgtctctactaaaaataaaaaaaaattagctgggtgtggtggcgggcgcctgtagtcccagctactcaggaggctgaggcaggagaatggcgtgaacccgggaggagcttgcagtgagccaagatctcaccactgcactccagcctgggcgacatagtgagactccatctcataaaaaaaaaaaaaattaaaaaaattaaatctcaaaacaaagttcccagggaaacattcttttcatgtataggaattagtggagtgtgatgtcatagtaataagagaggttagtggttaagagcagaggcttggaaattaggaaacctggatttcagtatcaagctgtgtgatcctgtgcaattaatcccctaagcatcaggattctcctctgtaaaataggaataataagagacccttctaaatgtggctcttgcaggaaaaacatgagataagcatacttttatgccagtaaaggacttagcaggatgcctggctcgccgtaagtacccaacaaattgttggctattataaatatgataggatgacacaggtaggcacatgactctcagatacttttgcctaggtgtttaaaataacaggaaagccatcatcttagttaaatacatgtactaaatagagaaaaatacatgacagccacagttggaattttgatgataaaatggtaattttaacataaattgaatagcatatttaaaaaaaaaatctctgaaacagtcattccagtggaaccaaggaactgtagacctggctcgcagagggagggaactttgcttttaaagggtcctggcttagttgcattagttactacagacaccaaacacttggatgaagttgttattaggatttactttagggccgggcacggtggctcacacttgtaatacgagcactttgggagactgatgcaggtggatcacctgaggtcaggagtttgataccagattgaccaacatggtgataccctttttctactaaatacaaaaaattaggcaggcatggtggctgatgcctgtaatcccagctacttgggaggctgaggcaggagaatcacttgaacctgggaggtggaggttgcagtgagccaagattgtgccattgcactctagcttgggcaacaagagcaaaactccatctcaaaaaaaaaaaaaaaaaaagaaagagagagagagagatttactttagctttgtgcaatgtctgttattaaaagcctttggtggccgggcacggtggctcatgcctgtaatcccagcactttgggaggctgaggtgggtggatcacaaggtcaggagattgagaacatcctggctaacatggtgaaaccccgtctctactaaaaataccaaaaaaaattagcgtggtggtggacgcctgtagtcccagctactagggaggctgaggcagaagaatagcgtgaacccgggaggcggagcttgcagtgagccgagatcgtgccactgcactccagtctgggcaacagagcgagactccatctccaaaaaaaaaaaaaaaaaaagcctttggttcagttttatttgttttctgtgtttaagcaaataaacacccagtgttttccaagagcattttgactctgggctgctctccagagaagcaggatataagcttgtccacaaacccaaatgaaaacaaagggcccacacaattgccacgcatctggtgaccagacaagttcactaaatctcagctggggtggaagttccttgagaccagggaatttgagtcaccttgtaaccctaaacaaagccaggcataagttggatgcttaccatatgttagttaattgaaagaaggaaaaacagagcactgcactgatagagaacagtgactgtgcacctgatgtgccgcaatgtggtttggtgttaaaaaaaatcactctcattcattactagtaggagttcaaatgggaaccacagttccaaaaaagcaattttggcaacgtgtaatgacagccttaaaactataaacacaaagatgttccctgcagccttattcataatttttaaaaataaaaaacaaactaaacatctaataataggctatgtaatcgtccagtagctctagtggatggactattacattattataattattcaaattaatattttcccgcttcttccctgctttccttcaagaggtgggggaggccacctggcccaagctgaaggccaagatacaagaaaaaaatgcaaaggttctattttggcagcgtttacatgggcagggtgtcgtggggaggctggcggagggagtgggagcaggtgacagagaatatagggtaagttagaaggctctcagtgctggtaaaaataaaatagagtaaagtaaagggtgggggtagagttgaggggggcgtgatcagatttctgttcaaataggatggtctttttgctgtgaacttaagactgctctaaggccaggcgcagtggctgacgcctgtaatcccagcactttgggaggccgaggcgggcggatcacaaggtcaggagatcgagaccatcctgcctaacacggtgaaaccccgtctctactaaaaatacaaaaaattagctgggcatggtggcacacgcctgtagtcccagctactcgggaggctgaggcaggagaatcgcttgaacttgggaggcagaggttgcagtgggctgagatcgcgccactgcactccagcctgggtgacagagtgagactccgtctcaaaaaaaaaaaaaaaaaaagactgctctaaaaaataaagtgtattaaaaagaaactacgatgttcagtgtatgcttcatctacggtcaaagaggcaaagactgaagtgacagtggaagccaggtggttatctgggaggcttacaagactatgtgatagtatggaaaatactagtattaagtgaaatgctggatgcaaaactatgcatagaggggaaaaactggaaagaaatagtaaacacagcaaaagtagtttgtgtgaaggataaattttttaaaattattttttgtagaaacagggtttctctacattgcccaggatggtctcaaactcctgggctcaagcgatcaatcctcccacctcggcctcccaaagtgcacaggtgtaagccaccgcgcccagccgaaggataaggattttgggtggtgcgctcttttctcctttccatttctgcattttccaatttacctttagcgaccgttctttcctgttaaaaaaaaaaaattcacgaccttgaagaagatacacgggctatgacttcgctgttgtcaccgagcgccccgcccaccgcgttctccgacccgcggccggcagggggctcgcggcctccgccaggcgtccttcggctccgtcagttcccacagggccttgtgcgacatgggctgcgccgagggcaaggcagtggcggcggccgccccaacggagctgcagacgaaaggcaagaacggcgatggccgccgtaggtcaggtacgaccgagggcgaaggcctggtccccaggtcgacgggccgaagcgggccttccggccggggttggggataaagtgccccggagccctggccttgaagcccctcactggagtcagtgactgaccgcgcgccacgctggagaccccagaaacgctcccccaggtcaccccgggagacggaggccggcggccggccgagggctgccccgcccgctggctgtgagagaggtgggaggtggaaggaggagcgggcccgccgcgaggacctgcccggaaacctgtcggaaaccgaaccgagatctcggcagcgacccgcctgatttcgctcagggcccgttagggcgtcctcttcctacaagcaccgtgtttccaatgaaaggttacgggggaagcgaccaaaccgacagccgagtccgggggtgccccttcacctctccagaagcccccggcccactcccagcatcctcctccatcgagaatcttgtccgacacgccttcccggccccctttctccatccccttgaattttgggcacatttctcccaccatcatcccgctttatcctttcacttgttcttccagaagagaaagctcccagtctcttctccattgtccggataatgccaataatggctagtggttactaagcactgacatgagaggggcctttggaagcactagacatgggtaataatcttggttcatgtttccagccatactgagagatttatcataaaccccattatacagatgaagaaactgagaagcaaagaggttataaaacttacccaaagcacacaactagtaagtggaagagctgggataccagttgaggccatctgactcaaaagccctggtcatagtcatatggccgcctccaccttttttataggcttgagaaagtgaggctccaaaaagtgccttgcccaatggctagaattattaaatgctgtaggatctgcctctttcaaaggcttacagtttagttacaaggcagcatatggtgaagggctaaaaggagtggtaaaaacagccaagtggggatggcagctcccatagatgaggtaggatttggtagaggtgtctgaagggagaacattcttgttaggggaagcagccggtgagaccatgctagagatagggaggcctgtatatcctgctggagttaaggacttggattaggggaagggaagaataaaggaacagggtaggagcaaggtcaggcaaggtccaggtcaggcagctaatttgtggccattagtacaatgaaggagtttgagcaggtgcatcccaaattgacgtttcatgtgccatcctcaggatcttcttgatatctatgtccttccatttatttactgtttttctttagctacattctttttgtgtgtggttaaaaaaaaaaaatttaccatcttaacaattttgttttttttttttttttagtttcgctctcgttgcccaggctggggtgcaatggcgccatcttggctcacctcagcctccacctcccaggttgaagcgattctcctgcctcagcctcccaagtagctgggattacaggcatgcaccaccacgcctggctaattttgtatttttaatagagacaggttttcaccatgttggtcaggctggtcttgaactcctgacctcaggtgatctgcccacctcagctccccaaagtgctgggattacaggcatgagccactgcacccagctgaccctaaccgtttttaagtatacagttttcagcagtattaagtatattcacattgttgtgaagcagatcccctgaactttttcatcttgcaaatctgaaactccatgccaactcgttaacttttcatttgccgtttcccccagcccctggtatccatcattctactttctgtttctgtgaaatttggctactttagattgcttatataagttggtatcatacagtgtctgtctttttgtgactggcttgtttcacttagcatacttgtcttcgagtttcatctgtattgtagcatgcgacaggatttccttactttttaaggctgaataatattccattgtgtgtgtgtatatgtacatacacacacacatatatacacacacacacacacaaaatggaatatatatacacacacacaccacattttttttttcccgagatggagtcttgctctatcgccaggctggagtgccgtggcatgatcttggctcaccacaatctccgcctcctgggttcaagcaattctcctccctcagtctcccaaatagctgggattacaggcccgccaccatgcccagctaatctttgtatttttagtagtgacggggtttcaccatgttggccaggctggtcttgaactcttgacctcgtgatcttcccgcctcagcctcccaaagtgctgggattacaggcttgagccaccacgcccggcctgaactattttataatacagaaaagctcactcgttataatacaacttgctaaatttttacaaacgaagtatatgcatgcagcccacactcagctgaggaaataaacgtttccagtaccccaggagcccctctaatgtctcttacccccataccaagggcaaacactactctgatttctaacagcatagaagaatttcacctatttacatttactttttgaaacttaaatttaggcatattttaagcattaatctattaaagcacggctttatactaggtatttttctttttcttttctttctttttttttttgaaatagggtcttgctctgttgcccaggctggagtgcagtggcccaatcatagctcattgcagcctcaaccgcctggtcttaaacaatcctcccacctcagcctcctgtgtggtaaagtgtgccaccaagcccagctaatttttttacattttgtagagatgaggtcttgccatgttgcccaggctggtctcaaacttctgggctcaagtgatcttcccaccttggcctcccagagtgctgggattacaggtgtgagccactgtacccagcctagatatttttctatacacatacatatatacataatgatgattattatttttctagagatgggtctcactctgttgcctagattagagtgcagtggcatgaatcatagctcactgaaactgaactgctgggctcaagtaatcctcctgcctcagcttcctgagtagctaggattacagggacacaccaccatgcctagcctcaattttaaattttttgtagagataggtctcactaagcaacagccccatctgatctcgaacacctggcctcaagtgatcctcctgcctcagcctcccaaagtatactgcaccaggcccatattatacataactattgacattaaaaatgttcttttgtgtgtcacctacaaacactctagaagccaccttccttaagtaccatatgatctctaagttccttctcaaattaaaattatgtggttaagtttcaagaaactaatttcttaatgatgcagaaggttttgcttgaatgactcttcaaccgagcatctattatttatcaggcactgggaactcagggataaacaaggcatgatctcagtccttgaacatagagtctcgtggagaagaatggcgtagaaaatgcagtgtcatgatgtgtaatcataaaagtagatgggtacacaccacttcaggagaatggcagagggagttaacatcttggcacttagcatttagtatttcttctgtaacacacattccattctattttaatgagcttgcaaacatttttcctgctggatttttgaggatcaggaatgtgttttgttcactatcttatctcctacagtccttggcatactgccctacaaatcagtaaatgtgtttatatgactcatatggcaaaaggcaatttttttttttttaataagtgaggaatgttccaaaagccaatgctattaacattgaccagcttcttctagtaaggagaggagacagtattttttcaaagtgcggtcctaagaccacctgcaagagaattaattacatgctgggaatgtgtagattaaaaactcattttcctgttctccatttcagacctactaaatcagcctcagagtgaaggaagcttcatttttggtgtctcaagtgattctatttgaaccaaggcctgagaacactgcagtgaggtgtttaggccagcgtcaaatcacctatttctgggcagaggtgcctatccttagcaatggggctgaggctggggtggaggttgctactgcagatcactgaggctgataagggtgagtcagatgccccaagaggaaattgaaagctttggaatggaaccaaagatcgtgactgacatgcagtcatgcaatctgcaatcagaagttagtattacacgatgcgctagataattgtagagtaatcttgctttttgttgattttaaccaggtaatttaaagtcattactcattatttggattttcacatttgaatgtttactctttgtattaatgtgtactgagtatttaaagcttttaaattagcttttttaaaaagtgtattttaggccaggtgcggtagatcatgcctgtaatcccagcactttgggaggccaaggcgggtggatcatctgaggtcaggagttcgagaccagtctggccaacatggtgaaaccccatctctactaaaaaaatacaaaattagctgggcgtggtagcacacacctgtaatcccagctactcaggaggctgaggcaggagaattgctttaatccaggaggcagaggttgcagtgagctgaggtcgtgccattgcactccagcctgggtgatgagaacgaaactccgtctccaaaaaaaaaaaaacggtgggggggaggcggtattttagatttacagttggattaaatccttgaaagaactcaaaagaaggaattaatctgttaatgccttttctttaccttcataaaacatcagggaatatttcatgaatattccttatatcctactttctagctctgagcattactttgctggtagaaactagtctacatgtatataactataaatgactatcacaaatcactctttgatgttaaaaacaaactatctggctggttgtggtggctcatgcctgtattcctggcactttgggaggcccagctgggaggattgcttgacaccaggagttcaagaccagcctgggcaacaaagtgagcctcagtctctgcaaaaacaaatagctgggcatggtggcgtgcgcctgttagtcacacctgctcaggaggttaaggtgggaggatcgcatgagcgtgggaggtcgaggctgcagtgagccatgatcaggctactgcactccagcctgggtaacagagggagaccctgtctcagaaaaacagcaacaaatctacctgttgggtttttcgtttgtttggatttttattttattttattttattttgagacggagtttcactcttgttgcccaggctggagtgcattggcatgatcttggctcactgcaaactccatctcctgggttcaagcgattctcctgcctcagcctcccaagtagctgggattacaggcatgcaccacaacgcccgactaattttgtattttttgtaaagacaagggtttctccatgttggtcaggttggtctccaactcctgacctcaggtgatctgcccacctcagcctcccaaagtgctgagattataggcatgagccaccgctcccggccacctgttggttttagtggtagtgcagtggttttcagctttcaacattcaagtacgctcccaactttgacaaatatagaaaagttatttttgccacaatttagtgtgtttatggaaggtgtatacagaaacttcagatgacagtgtctgttagatgaaaaactgagctgggcaggtggtgggaagttgtatagacccagaaataacttgttatgggaagaattaagaggccacaattaatgggttgaaaattaaaaatctgcagggacaggcaggtcatataaatgagtgacccaggcaggtagtaaacagcagggagtggtggagactggggtggactgaggagagaatgctgtacagacagggcaatttctactgagcttccctttctttgggtgggaaaatgagtgtagtgtggccagacctgctttttttcaagagaaactagaaatctctatttatcatttttgtgacttccccagcttgtgaatgtcagcagtaatgcaattaagcaaaatactgagggtcaaacaagatgtgattgcaggtaaatatggtctgtgaatgtgtagaataatgtcaagctggcacacatttaaaaaatgagaaaaagatggtgtcttttgaatgtatagaagtggctgggacagaaaacagtttttcttagatagtaacacagtgcagagaagtgtctgagtgaacagtgtaaatgaccgctgtcaaagtatggttttcgaaacgttaaaaatatgatcttgtacagaaaaaaaaacaggtatcaaaacttagtcattaattaaaccaataaatgaaagaaccaataaaatggtaaagctaatttaaaggcaaattcaaggactagggacatataatcaaagaaatgatgaattgaatttgctagtacagtagttacaaagctggttaatgtctcacagagcaataaaactaacttttgggccagatgcagtggctcatgcctgtaatcccagcactttgggagactgaggcaggcagatcacttgaggtcaggagttcgagaccagtctggcgaacatggtgaaacctcatctgtactaaaagtacaaaaattagccaggtggtggcatgcgcatgtaatcccagctactcaggaagctgaggcaggagaatcacttgaacctgagaggcggaggttgcagtgagccgagattgcactgctgcactccagcctgggtgaaatagtgagactctgtctcaaaaaacaaacaaacaaacaaaactaacttttgggattattgagcagaaatgtacgagttaacatgaaacttcagtgtctaggctgtaataaaatagtaaacagcaaagtcaagtacagatacactctcttaagaaaattaaatgatccttgggtgggcttgttaaacatggtccagtatgacattgaaaggacatttagtcaacttctttctttacttccaagtttggacatttttcttaagattgtggatattacagtgtagctatggctgccttgagattattgctcacttatatagtggcattttaagctgcttaatcccctcaaatgtgctgccaaaattctactttttcaagtatgtgcagcagcttttctcaagtatgtgcatttaaacttttaaaaatgtttaaaacaactgtgagcaaatcgaaggcttgctgcactctatatagggtcaatgtttcattaagtgctttatcacaaagatttgtttagaagtgggcacaaggctcttggtcatcaaattcgttttaggtttagagaagtaatcttacctcttggagcaagagctagatttcactcttttatgtatagagtgagatcaaggaagaaggggaatagaaggaatagaacttagcaaacagctccccactcccaagtcaagtttgttagaaatgtaacactggactaccattgttgggagaccaaggagcatggtttcgctgtaccattcctttcacgggattccatgggatctttctagatgtgctggactggtaaaaatccttacctgtgggaagggagggtgtgtccagttgaagcagaataaaaggaaagctaaaccgggaggtgacccttgatcaagcactgggaaaaagtggtaaaagctcttgaatcactcactgagaggcagctgaaggtggggactggtgaggagggagcatgaactgctgcatctggcagccagctttggggaccagtggctggtgcagacttgctaaggagtgctaatggtgtttattaaaacaacaacaaaagcaatttagttactctggccctgggtgtgggcagagtagtgtgggaaggggagagggcagattgcaaaggaaatatatgtgagattgtttctttttgcataggcactgatgcataaccattcgcactggattagtcaaagctgtaactcctgatgaaatttctttaaggatgaaggacgtgtgacaagtttaggtctccttttaagcttgtggcacaagttttttttcccctgttccctgaccttgccagactccctcactcatctgttcatgaatggttgttctcttttacctaaaatatccttccttctctttgctgggcaaactctcctcacacatcaagacccagtccaaatgacagttttgtaattccccaagtagagatagttttgccctttctggacatctgtggctcttctcattttttttgtaggacatatagtgtattgtgtagcattctattagactgggctcctgggggtaaggatgtcttgtttattttttatttatgtttttttgaaacagagtcttgctctgtccccaggctagagtgcagtggcgcaatctcggctcactgcaacctctgcctcccaggttgaggcaattcttctgcctcagcctcccgagtagctgggattacaggtggccaccacacccagctaatttttgtttttttagtaaagacggggtttcaccatgttggccaggttggtctcaaactcctgaccttgtgatctgcctgccttggactcccaaagtgctgggattataggcatgagccaccgcacctatagctgtcttgtttagagttgaatttcctgtttgggatagttcatggcacatagtagatgctcggtaaatgttcaaatatagttgtgtcaagttattccctcctgattttctcccccactgtttgatcaacccaggaatctctttcccccttggaaacttcttttatctacctctctgcccctgactcactggaatcctacaaatgggacatctcaggcaggtaaaattgccattgttatgagggtgagagaatgcagattttttacagtgtatttccaatgtcccatatggaacattgtatttcccagtaatacagtttttttgaaagaggggataacaccaaagtagtcttgttaattagataatatttattcatttaatacttactaaccatcttccatatgttaggcattgttgtaggtgctggggatctgtgagtaaatatgcccatatggagttgttttctagagtaatgtagaacttctgagagctttaataaaaaggagtaacatttattgaatgcttattatgatccaggtactgtgctgagtgctttatatgtattaacacatttaatcactgcaagaggcaaatgaggaaagtgaggcccagagaggtaacaagcatacaactattaagtagtggagcgaggattctcatgctggaagctagtgtacttaaccactgtgctctactgccttgcttaatagagtgattgggcacgtctaatgaaaccttggtgatatggtttagctctgtgtccccacccaaatctcaccttgaattgtaatgatccgcatgtgtcaagggcagtaccagatggagataactgaatcatgggggtggtttctgccatgcctgttctcatgatagtgagtgagttctcatgagatatgatggttttataaagggcttcccccttcacttggcactcattctctctcctgccaccatgtgaagaggtgccttctgccatgactaaaagtttcctgaggcctccccagccatgcagaactatgaatcaattaaacctctttttttttttttttttataaattacctagtctcagatatgtccttatagcagcgtgagaatggactaatacacctggattcctccatcccttcataagacctgaacaggaagcactgtttcccattaaaataagcagttgaaataaaatcaaactttttagtggattaccagtatctggaaacaatagaaaaaggagcttatgccgggcacagtgtctcacgcctgtaatcccagcacttcgggaggccaaggtgggcggatcacctgaggtcaggagttcaagaccagcctgaccaacatggagaaaccccatctctactaaaaatgcaaaaaattagctgggcgtgtggtgggcacctgtaatcccagctacttgggaggctgaggcaggggaatcatttgaaccctggaggtggaagttgcagtgaaccaagatggcaccattgcactcaagcctgggcaacaagagtgaaactctgtctcaaaaaaaacaaaaaaagaaaaagaaaaaggagcttattcataacagtttaaccttatatttagggacaggtagacagttatacggatgctgaagacagccaaaaatgtctagcttaggttgtagatgctgaacgctgtgggctcactgacccttgcctatgaagcactgtagaatacctttatcacttcatttccataagttcagttatgtccctggaatataatcttgaagcagaagagcctgatataataacagtgtagcctctaaggttgatccccaatataagatgatctttacagagatctcctgttatatttcaggctacttatttagattatggctccacaagtcatttgaggcaaagtggaaagagaattagagtgaagagaacggaattctagtttctgttatatccttaaatagctgtgtgattttagacaagttccaaagcacctatgcgccttagttccctcatttgcaaaatgaagtgaatggatgaatattaagtcctctcaagctgtaaaattctgtaggtctgtctcccataaaattaaaattaggcccgtaaatgcgtagaaaatgtaataattccaaataaaaatacctagcatttttggattccacaatagcaaggtaatttcccatgtattatctaagatgtgtctttttttccggtcttggctcctggaatgcatgcctgaatgactactaaggttttaactcattcactttattttatatggtaagtcagtagctcaagatagtaaggaataacttgctttaaagtaataaatatgttaagacccaaaagactgtcaattatatttggaaaagatttgggtagaggaatttgctacattcaagtacatttctggaaccagttatctgaaagtagtgatccttaaattcatgtcctcctcctaagatctctagtgcagtgttttataacaactgctgagtaacaaatatatctagtaggatatctttttaattttatttttaaaattggtatacaaataaaatagatttttggtgtccttttaattttttattatttattttaatttatttctttttggagaaagggtcttgctctgtcacccaggctcaagtgcaatggtgtaattatagctcacagcagcttcaaactcctgggctcaggtaatcctcctgcttgagcctcctgagtagctatgaccacaggtgagtggtaccatgcctggctaacttttttatttttatttttatagaaatgaagtcttcttatgatggccaggctggtctcaaactcctggcatcaagccatcctccctcctgggcctcccaaagtgctgtgattacaggtgggagccaccgtgtctggcctttggtgttcattttatgaattttaacatatgtatacatgatcgggttacataacagttccgttaccccacaaaatttcacccatgctatccctttgtggttacagcctccccagttgattaggatacaactgtattccaatctctggagccactgacctgttctccatcaatatagttttgtcttttcaggaatgcgatataaatggaatcacaaaataacattttgagattgattttttcacacagcataatacttttgagattcatctaatttgtcatgtgtatctatagtttacttcattttattactgagtggtattacattatacaagtgtaccataatttttttgtcctttcattcattgaaggatatttagattttttccattttttagtgattatagagttgctataagcattggtatataagttttttaaaaattgatatataaggctgggtgcagtggctcacacccgtaatcccggcactttgggaagccgagcggggcagatcacctgaggtcaggagttagagaccagtctgaccaacatggagaaaccccatctctactaaaaatataaaattagctgggtgtggtgttgcatgcctgtaatcccagctactcgggaggctgaggcaggagaatcacctgaacccagaaggcggaggttgcagtgagccgagattgtgccactgcacttcagcctggcaacaagagcaaaactccatctcaaaaaaaaaaaaaaaaaaatctgtatttgattaacataccataaatataggccggttgtggtggcttactcctgtaatcccagcactttggaggctgaggcaggtggatcacctgaggttgggagtttgagaccagcctgaccaacatggagaaaccccgtctctactaaaaatacaaaattagtcgggcgtggtggcacatgcctgtaatcccagctacttgggaggctgaggcaggagaatcgcttgaacccaggaggcagagattgtggtgagccaagattgcaccattgcattccagcctgggcaacaagagtgaaactctctctcaaaataaagtgggggcggcaggggaataaccatttaaaagtgcacagtttagagtgcaaccttcaccactattgaatttgagaacattttcttttcttttttttttgagacggagtctcgctctgttgcccaggctggagtgtaatgatttgatctcggctcactgcaacctccgcctcccgggttcacgccattctcctgccttagcctcctgagtagctgggactacaggcgcccgccaccacacctggctaatttttggtatttttagtagagatggggtttcactgtgttagccaggctggtctcgatctcctgacctggtgatccccccgcctcggcctcccaaagtagtgggattacaggcgtgagccaccgtgcccagcctagaacattttcattactccaaaaagaaaccccatacccattagcagtaaattttcactctttccctagcaattgctagcctactttctgtctctatagatttgcctattccgagcattacttttctttttttttttttttttttttgagacagggtctcactttgtcacccaggctggagtgtagtggtgtcatcttggctcattgcaacttctacctcctgggctcaagcaatcctcccacctcagcctcctcagtagctgggactacgggcacacaccaccatgtctggctaatttttgtacgttttgtagagtcagggtttcaccgtgttgcccaggctggtcttgaactcctgagctcaagtgatttgcctgccttggcctattctgggcatttcttataagtggaatcatacaatctatggtcttttatgagtggcttctttcacttagcataatattttcaaggtttattcacattgcagcatgtattagtacttctttttattgttgaataacagtgcattgtatgaatatacaacattttattttattttattttattttattttattttatttattttttttgagatggagtctcaccctgtcgcccaggctggagtgcaatggcgagatctcagctcactgcatcctctgcctcccgggttcaaccgattcttctgcctcagcctcctgagtagctgggattataggcgcacgctaccacgcctggctaatttttgtatttttagtagagatggggttgcaccatgttggtcaggctggtcttgaactcctgacctcgtgatccacctgcctcggcctctcaaagtgctgggattacaggtgtgagccactgtgcccgggcaatttttatttctattttaaccacttcttggacatttgggttgtttccactttttggctgttatgaataatgctgagaaccatcatgtacaagtttcatgtacacatgtattttttatttatcttaggcatatactttgaaatagaattgttggaccatatggtaactatatgtttaacatttttttcattttttttgagacagattcttgctctgtcacccaggctggagtgcagtggtgtgatcttggctcactgcaacctccacctcccggttcaagcaattcttctgcttgagcctcctgagtagctgggactacaggtgcatgccaccacgcccggctaatttttgtattttcagtagagatggggtttcaccatgttggccaggatggtctcgaactcccaacctcaggtgatccacccaccgcagcctcccaaagtgttgagattacaggcatgagccactgtgcccagccatgtttaactttttgaggaatttctaaactgtttcccaaagtgtctatactattttacatttctgccagcaatgtattagagttccaaattttccacatccttgttaacactagttattgtctatcttttttattctagccatcctagtggtgtgaagtggtatctcactgtggtttgatttgcatttccgtaatgaataatgatgttgagcatattttcatgtgcttactgtttatcttctttggataaatgtctgttcaaagtctttttccattttttaattgggttttgttttgttttgttttaaggagcagaaagtttaataggcaagaaagaaggaagaagctcccccatacagagacagagggaaagtcaagaggaaaccctgtgtggggcagaaaagtggctacttatatgaggaggctggaggaggtggtgtctgatttgcatagtgctcagtggattggtttgatcagcatgtcattcacgaagcccctgaaaaatctggccctcacaccctagccttttaatatgcaaatgcagggcgccatgatgttttacacacgtgaggatgtgtgggggtgaccatgttgccaggcacatgtcggggcaagggcaagaaaaagagggtgggaatcaccatgtttgggtggactcagtttctaatggcttgcattttcatatcaaaggttgcctgcccggctctaagagcccggtcttccctgctagacaagaaacatttctggagctgctttaaaagaaacgaaaacttcccaaggaccccttttcctgtctctctgcctaaaataatttattaataactcctataacattctcccctgtggagaggtcaccctaactgctgttagggggttttgggcaacaactatttctggctacttcctgctgaaaaggggtgtcgaatggggaacagcagctagggcccctcctggggtcgataagggtcctcagaagaatggcatgtccatgcatggttcagtttgcagcagcatttggagttggattgcttctaggcgagaggaaacaatttgatttatagtattgagaatacagggttcaaatattaatacaagacatataagcaagagagggcttaataaaggggttaaccaattccataaagaagactggaatgcattaaagagggattgtagccacccggggctgaagcctccatttttccgtcagcctgtcaatagttttgatttgatctttaagtacctggtgtagtaaataattttcatctaaaattttacttgccaagatatagaatttccctctggggggtgtctatgaagttccttgattttattttcccaaacaaagaaacctctgggttatgggcaccctactcactttcattacctggcagaatttgcaggataattgctcagaactaccatattgatctggatttttacgttacccatccctttttgtttcttccaagctgcaggtgatcaccacttggtccacaggaataagcagggttagtttaaaatgtaggcaaaaagcttaaaaacaattaatgagactaggatttaatgacaaatgtatgataagctttggagaacaatttctctctccagtccttatttttggtaaaaacaaattattataggactgtgtgtgttgttcatagaataaactttagtcttatacttggcctgattatttgcataaagtgcagcaagaatggttatttctgcataggacttttggattggctttgatgaaacactattccacaaggaatttcagataagacctttaaagccaagcccagccatgggattgtatcctcaaatatctgtaagttgggtgatcctcttctccttgaggtcccaagataaacttggagctcctggcctattagaaagtgacattcttaggctggcacggtggctcatgcctataatcccaacactttgggaggccgaggtgggcagatcatgaggtgaagagatcaagactatcctggccaacatggtgaaacccctcatctctactaaaaatacaaaaattagctgggtgtggtggtacacaactgtaatcccagctacttgggaggctaaggcaggagaattccttgaacctgggaggtggagattgcagtgagccgatggagccactgcactccagcgtaggtgacagagcgagacaccacctgaaaaaaaaaagtgacgttctttactgaccacaggttaggaaccctgtgcggggactgggtagacaagacatgaggccagtgctccccaagggcttttattggctctgcatgtcaagtttgattccttaaagagaaacacacccttttagtcaaagccttgatcttgttagacataaattttcggtgctgcaaaggaaatagcgctcgaatatgaattttctcagcaaggcaactttacttttctgcagaaaagatgcttctaagaagcctgattgtcatgagagcataccaaacaaagaaaagcagaggtttttatccctgacacattgggtccttactgcagtgtcctatctccattggctggagctggaccgcacaatctagactgatcctgattggctaaaaacttaaaactttcctaaataggtaaatgcacaatggagaacaaaggaaggaagggggttgtttacaaactaggagaataataacatttccaaataaggaagagatgtatgctgtaagctgggaatgcctgggcattttcagacatgtctgagcaggttataagccagaacaaataacttggttaaagtacaaggacatagaatgtacttattcccttactatatttaacagctacatagggcttaacaaagagttactagcaaaaagcaaggaagcttgacggaagttagtttttaaaagaaactattatttctaacatttattatttattctttaacaaaaagggaaacttttgaagaggaactttttacttttcacggtaaaataaccagtttttccaattgtgtcctgttgacaaagaaaaatggatttttattgcactgatgcaaacaattatattgccataagttaagagtactcacagagagtttccaaattctagaggaaccagacagagaaaaataaaaatgctccaaattttgttcacaggagtataccttactcatttttttctggatggagtttcgctcttgttgcccaggctggagtgcaatggcacaatctcggctcactgcaacctctgcctcccaggatcaagtgattctcctgcctcagcctcccgagtagctgggattacaggtgccagccactacgcctggctaattttcgtatttttagtagagatggggtttcaccattttggccaggctggtcttgaactcctgacctcaggtgatctgcctgcctcggcctcccaaagtgctgggattacaggtgtgagccaccgcacctggcccccttactgaattatttagggccgtaaatatatcaaaataagtttccttaactctgaaaatcaaaacaaggatcagcaatatttcaagcaaaagtcaaaagggttgctttaactttctgagtgcagtccatttagttaactcttattttgcttgatatttgtgaatatgtcagttctgtatgagtcccatacattcttcttctatttcaatattacaatcttcaaagctattaaaaacctgtgtttgagaatacctgttaaagtccttaatatagcttgattataaactgtcttcgagaaggaacaaagcaagacaatttgtttgcaaatgacaaaatatgtaggagttacagttaaaaacatggctgtagactacctatttgcattttgatgatacttgcattttgccaataatctttgagactgtttttatttcttaaagtcacatgaactaaaaagtatttgatttaagcacatctttttctttttttgagacgaagtctcactctgtcacccaggctggagtgcagtggcatgatctcagctcactgcaacctctgcctcctgggttcaagtgattcttctgcctcagcctcccaagtagctgagactacaagcacgcaccaccatgcctggcaaatttttgtattattggtggagaaggggtttcaccatattggccaggctggtcttgaactcctgacctcatgatccacccacctcagcctcccaaaagttctgggattacaggtgtgagccaccgtgcctggccaaaaagcaactaattttttaaaaaataaacattttaaagtcagggaaaaaaaaaaaaaaaaaagaagccttccaaaatttaactcaggtatttgacctctcatgaaggaatgttatgctgcttctgagccaaactctaactgcagctagaacaggcagctctgcaagcagaagaaaattttggagatgagcaatatatctcctatagtaggccagaagggaaaagaaaaaatagggaaggcaaagaaatagggggaacaccattcccaataggaaaagaggcaatacctcttgatgaccctcaattggaactcctttctatggtgtttttccttcatttgcagtttaaaatggcttctatctcttatgtaatgttcttctaacctgggaaaagttaattttccaaatcttaaaatgcttggcttagagttgagctgggggaaggtgttggatataagagctcggagtcgcaaagaaaatgagcactcaaagaatttctcagcaaggcaaatttacttctgcagaaaggtgctgctcattcttctggtcactgtgagagcacactgaacaaaggagggaagggtttttatccctaatgcagtcagtccttgctactgtgtccgatccccattggttggggttggaccgcacaatctaagctgatcctgatttgctacttgaaatggagcaggggtgggggctacaaaagtaagggtgccaaataaggaacagatgtgggttgttacagattgggaacggatgtgcgttacagattgggaatggctggaaggttgtttaccgtacctaggggcaaggaggcaaggaagttaggctttgaaaatagaggacaagcagaacctttaaagaagaactcactgtttccagcaaagggaacccagaagcctgatatgacatcaagagggtaaaaaggtttaccagtcgggcttttggcttctctctccttgtgcaaaccagtaaaagggataataaggatcattgtttatattctctgtaaatttatagttaatgaaaaaggatttgtgaggttagtcttaagctgtagacaatctggtgtgctttgcatgtctttctgtgtggttctgttgaggaaagggtatcttaggttagaatgcaggcccagaaacccataagcctgctgtttgagccaccccaacaaaatggtcagtaacaaacttagctacaagcttccatgttgtttcatgtccttgggaacataacctgtagccacgtggcaatactttattttagtccctgcaattttacaatggtggctgtcttcttgtgctaagtcagttcctgggtgagggccacaaaatcaagtaaaccagtttgttaatctgggtggtgccagctgatccatcaagggcagggtttacaaaatatcttaagtgctaaccttaagagcggtttagggagggtgaaaatcttgtagcctccagctgcaggctcctgggccatggtttctaatcttgtggctagtttcttggtctgttcccaggcaagagggaagtatatcttgggaaatactgttatcatctttgttttagactatagactgtaaatccgactcctcccaaagttggttcggcctaaaccagggatgggcaaggacagcttgggggctgaaaacaaaatggaattgtttgggtcagatctctttcactgtctcagtcacaattttgcaatgacagtttcaaaagcttcctatcactcctttgaaaataccttgtacacttgcattaagtcataacctaattaaggctcattggtttcacctgtgaggttactgtttgtaaagttcaaaagccaaaaatcttaactgcttggcatggctaaagtcgagtaacaagggattttaaaggattttcttaaagagcactgagcttaattaaaagttcaggcatggtggctcacacctgtaatcccagcactttgggaggctgagatgggaggatcacctgaggtcgggagtttgagaccaacctgaccaacatggagaaaccctgtctctactaaaaatacaaaattagccgggtgtggtggtgcatgcctgtaatcccagctacttgggaggctgaggctggagaatcgcttgaacccaggaggcagagctgtggtaagctgagattgcaccactgcatgccagcctgggcaacaagagtgaaaactgtctcaaaaaaaaaaaaaaaaaaaaagtggatattcaagttacagggttataggtatatttaaggcctttatgtttttctcttcttggatcttgtttttctggaaaaaggctcttttcttctcagttgactgaattatttttctccattttttgtcttaccactcttaatgcatgcatgagaggccctaagataacttctggtaacatgggactgctggagaaaaacagaggaggcatcacagactccgttctgggggggttgggagggaacaagaaacaaatcaaaaaaacctctgttttcctcatgaaactctccaaattaaaagcagatagttccctcaaaatcaaaggctctgtactgttatgtattgtgttatctaccgcttttgagttttggggtatcaaattacttcacattgtgggagagctttggtgtgtaataacttacagtgtagaaaatacactgtaaggggtggctaatagtagttataaatcagagaagcatgctctgcgccatctgaaagatatggagacatccccataccccaataagagatgagactcccttgagggatgggctaattacaaattaagccaattagcttggagttgccttgcaatgaaatgcatggtagaagcactacactgtcttctcccatagtatcttcctccttttggggacccaaaatccagtataaaatggcaccgttaattttagggatctctctttgccttcagttgtgcctgcttattaggccctaaaaaacgcatactacccggccctgttcctccaagggtttcaccctaaagccagtaatacaattaagaaactggcaaatgaaaaatcttaacaagtgctgaatattctgtctgtgttgttatagatgtgttgtgtgtaatgtctataaaaacagctctaattgattggcttaaagaaaaataagcactaggccagacgtggtggctcatgcctgtaatcccagcactttgggaggctgaggcaggcggatcatgagatcagaagttcgagaccagcctggccaatatggtaaaaccgtctctactaataatacaaaaattagctgggtgtggtggcgcatacctgtagtcccggctactcgggaggctgaggcagaagaatcgcttgaacccacgaggctgaggttgcagtgagctgagatcacgccactgcgctccagcctgggtgacagagcaagacttcatctcaaaaaaaaaagaaaaaaagaaaaaagaaaaataaacgcttaaataaaaaattttctagttcacatgactttaagaaataaaaatagtctcaaggattattggtaaaatgcaagcgtcatcaaaatgcaaataggtggtctacagtcatgtttttaactaacctgcaaattttgtcattcgcagacaattgttgtcttgctttgttctttctcaaaagacggtttataatcaagctatattaaggacgttaacaggtgttctcaaatgcaggtttttaatagcttttaatattgtaacattgacatagagaaagaatgtatgggactcataaagaactgacatgttcacaaatatcaagcaaaacacaagttaactaaatggattgcactcagaaagttaaagcaccctttttgacttttgcttgaaatgttgctgatccttgttttgtttttcagagtcaaggaaacttattttgaactatttacagccttaaaaaaaaagatgttgtgggtttttcatagatgacctttatcaggtagaaaagtttccttttattcctagtttgttgagtgttttttatcatgaaagggtgttagactctgtcaaatgtttgtatctgttgaaataactgtgtggttttcattctttattctattaatatgatgtattgcattgattgattctcatatgtttaatcaacctgtgcaaggtttatcctgggataaatttcactcagttgtggtgtataaaatttttatatattgctggatttggtttgttaatgttttgtggataattttttttgtctatatttacaaagggcattggtctgtggttttcttttctttttttttgcgacagagtcttgcactgttgcccaggctagagtgcaatggtgtgatctcagctcactgcaacctttgcctcccgggttcaagtgattctcctgtctcagcctcccaagtagctgggattacagatgcccgccaccacacccttttcatgtgatgcccttgtctggttttggaatcagggtaataccaatctcatagaatgaattggaaagtatcccctcctcttctgtttttggaaagagtgtgaaaaattgctgataattctgtgttagacgtttgggagaatttatcagcaacaatcatctgagcctgggcttttctttgtgggaattttttttttttttttgagacggagtttcgctcttgctccacaggctggagtacaatggcgcgatctcggctcactgcaacctctgcctcctgggttcaagcgattcttctgtctcagcctcctgggtagctgggattacaggcgtgtgccactacaaccggctaattttttgtctttttagtagagacagggtttcaccatattggtcaggctggtctcaaactcctgacctcagatgatcctcctgcctcggcctcacgaagtactgggattacacgtgtgagccactgcacctggccaagagtttttattgctaattcaatctcttgtctattcaagattataagtctatttagcttctcattccttttttttccctagactcaagtgattctcatgcctcagcctcccaagtaactgggattacaggtatgtgccaccatgcctggctaaattttgtatttttagtagagtcaggggtttcaccttgttggccatgctggtctccaactcctagcctcaggtgatccacccaccttggcctcccaaagtgctaggattacaggcatgagccaccacacccagcctcatttcttcttgactcagtttgggtaatcatgtctttctaggaatttgttcatttcatgtagattatctaattcgttggcatataattgaattttttatactgttaatatgagcagtctaaaccagccttgcattcccaggacaaaccccactagctcgtggaatattattattccttttatatattgctggattcaatttgccattattttgttgaagaattttgcatctttgtttatgagggatattgatttacagtttccttttcttgtactgtctctgtctagtttgagtatcaggatgctactgacctcataaaataagtttgaaaatggcccctccccttgtattttctggacaagattgtatagattggtagggtatcttttattaagttttattttcctccagatatcctgtttgtaggtgtgtgtgagaaacagaaaatgttactgaatcagagagagtctaagtaccattgttttctgcagttttctcttaaaccttggggttaaaagaaatctgttgaaatacagtgtaaccacatgtcttatttctcagctttttgtgagagatctcaactgggaagattgaggtagtttcttttaagccctgttgttggtcacattgactgaacattttagtgaactaggattactccacttactggatattcttaatactaaggtaacaatatgaaaaaagaacatattttctgtatatatgtataaagcatatttagtgaaattgtgagagttattggtctagtataggcaagagaactttttagcttaattgagttctcaactggtatatagtatgtgtttatatgaaggatcagtttagtaattgtccacagattccttttatattttaatgactgtaattcaggttttacaatcagaaaaagcacctacattgtcttctgtgtatatgttttttgtccagaaaaggtatctttgtggaatttttttttttttttggagtgttgctctgtcacccaggctggagtgcaatggcactatctcgactcactgcaacttctgcctcctgggttcaagcgattctcttgcctcagcctcctgagtagctgggactacaggcgcccgccaccatgcctggctaatttttgcatttttagtagagatggggtttcaccgtgttagccaggatggtctcgatctcctgacttcgtgatccgcccgcctcggcctctcaaagtgttgggattacaggcatgagtcactgcgcccagtttttttttttctttttttgagacagagtctcactctgtcgcccaggctggagtgcagtggcatggtctcggctcactgcaacctctgcctcacaggttcaagtgattctcctgcctcagcctcccaagtagctgggactacgggctcacgccaacatgcctggctaatttttgtatttttcagtagagatggggtttcaccatgttggccaggctggtgtcaaactcctgacctggtgatccgcccgcctcagcatcccaaagtgctgagattacagacgtgagccactgtgcccggctgccaatggtatttctctcacagatgagaaaagtctgatttctttttttttgagatggagttttgctgttgttgcccaggctggagagcaatggcaaatctcggctcaccgcaaacttcgcctcccacgttgaagcgattctcctgactcagcctcccaagtagctgggattataggcatgtgccaccacgaccggctaattttgtatttttagtagagacggactctccactttggtcaggctggtctcgaactcctgacctcaggtgatttgcccgcctcagcctcccaaagtgctgggtttacaggcgtgaaccaccacacccagccagtctgatttctttttaaattttacttttatttatttatttatttatttattttgtagagatgggttctcactgtgttgcccaggctagtcttgaactcctaggctcaagtgatgctccttcctcagcctccctgttgggattacaggcgtgagccaccatgctcagtgaaaagtctgatttcttaagtcagttttaaaaggtgatatgctaagaaaaactttaacattttattttttcatttaacatcttttattttttatactaatgatttttttttttttttttttttgagatggagtctcactgtcgcccagactagagtgcagggcacgatctcagctcactgcaacctccacctccctggttcaagcaatttccctgcctcagcctcctgagtagctgggattacaggcgcacgccaccacacctggctatttttttgtatttttagtagagatggggtttcaccaagttggccagagtggtcttgaacacctgacctcaggtgatccacccaccttggcctcccaaagtcctgggattacaggcatgagccactgtgtccggcctactaatgattttttaaaagctctgtagtgtctgggtgcggcggctcacgcctgtaatcccagcactttgggaggccaaggcgggtggatcatgaggtcaggagttcgagaccagcctggccaagatggtgaaaccccgtctgtactaaaaacacaacaattagccaggcatggtggcgcacgcctgtagtcccagctacttgggaggctgaggcaggagaatcgcttgaacctgggaggtggaggttgcagtgagctgaggttgtgccattgcaatccagcatgggcgacaagagtgaaactccgtctaaaaaaaaaaaagctctgtagtattgcttttaaaatgattttcttatcttattaacagcatcaatattaaatttacagctaggtgaaagaaaggatatgtttttcttcttccatttggtccttcagtacctcttccacgttccctgtggtagagcccaaccctgacaggagactcttggtgctgagtgatccagtaaaccaagactaacccccaccctctcctacctcaaacacacagtgtctagttacagtggtagcctacatggatttctggcgtaatttctcttatcatgaaccattccataaaccagtcctctgcagaaaagagagttcctttcaaatgtgtattctcaggctcacgcagccactgaatcctggacctggcatataatcatattagaatacaactgtggagtgaggcaagtgggaattcttggctaggaccccaacataactaaggtttaatcttaaccttaaataagactcctttgaaggaggtacaagcacaagagctataaacaggatattgtagtcctttttatagcacttaagttcttcttatgacatttatttgtaaaaactaaaaatccttttaaggctaaaaaacctacctagggttttatttcaatttggtaaataaataatactaataactacaatgtacttattattaatttcaacactagaaattcattatcatgtccttttagggagtctttagtcttccttccgtgtgtttccataaagacttctgttttatttttccagcttgtctcatatcctacagactttcagaaacacatataactactttcttgtcttcacttgatttatagacactgtaatgggtatagcttacccatttaagcttccccactcttgggtctcttatggagtaacttctttacttgatggggtcttgtcagacccaagagtaatatttgtgtgtcttgtgggttgaatataatattgtaataattcttactttgttaaaaggaatcttctgagagtggtggtgtgtttgccatactccttgagcttgaactgaatgagttttgttaagaggtctggggttctgtggaaatccttgatttcttctgacttgcagtccagatgcttttaaccacaggcaacgagtaaaaatatgtgcatgacaaacctgtaaaccagaaagtgaagacagcaggcagagtggcgtgctataaaatttttatcatcacacttgaagtgatcgtgttgctcattaatggcgaaaactcaagttctaacacatggcagttttagtctgtgtttagccttgccatgtgctttcatctgccaggctcctctttgctttcccctttgtttccctgctttgaagttcattcattgtcctggtttactgtgaaatgccacttggggataactcaaaataggacagtggctttattacctgtgcttttcatatttcatgctacctttctgttttccagtttcccccagttaagttgcattccttatgtaccgtgatgttcctctgttgtcaaactagagcttcttcccacagctaagtggctgatcaaggtttctccaaagagataagtatcagttatatagctctctaagcaatgtgtagactgagagccactcaaaacctggctctctgcaggctttcaggtggcagtagtcatgggtgagagtcagtggttttggcaggtacaaacacatatgaattgtatgaagatgtttcttgaggaggagtgtcctggagtggaagtgttttcctttagtaatccctttactaatcccacagttcaaatatcttgctttatatccctaagagtacaaagatttcaatgaatttctctgtttagtgaagtcagagacaggaacaaatgcaataggctggtatgcaactttaattttttttttaagtttgggaaatacaggaaagaaaagtcatggataattctgtcacgccaatataactaatatgaccattttgcacattctttttcaggattcctatatgtcgagtttcacagaattgtaaaactatggtacataggacttggtattctaggtttttaaaaaactaacaattgtgtcaaactatttctacattattttgaatcttgaatagtatgcagccactaaataaggttagaacaagagagctactgtaatttagccattcctctaatgtcagacatttgttgtttctaattttttgcaatagctaatgatgttacaatgaaatcattggtaataattggataaaaagaagggattgaagacagggaaaagaaaggggtgtaggctgtagagcagggagagaacctctttgcagcttaggcttgggagagagaaaagctgtggcaaggtataactttgtccctgtatctagaaaggttatggacatgttcaggaggtccggaatggtgagtattgataggcctgtggcctgttttgttccactgggttttacaggaagttaacatgattgatcctaaagctatagcacttttattgaaagggaatttgggactatccccatttaactaggtgataatagctatgttaataaaaactactgaaagcttttcctaagagaaggctaggaggtaggggtctttcaatgttttcattattttagatttttttttttaaagctagtcgtcacaaataagaatactgagttaaggctcggcgcggtggctcacgcctgtaatcccagcactttgggaggctgcggcaggcgggtcacctgaggttgggagttccagaccagcctgaccaacatagtgaaaccccgtctctactaaaaatacaaaattagctgggcatggtggcacaggcacatgtcggtaatcccagctactcaggaggctgaggcaggagaatcacttgaacctgggaggcagaggttgcggtgagccgagatcacaccattgcactccagcctgggcaacaagagcgaaactccatctcaaaaaaaaaaaaaaaaaaaaaaaaagaatactgagttaaaaggtatggccatctcaggaggttgcagtgagccgagatccgagatggagccactgcactgcagcctgggtgttggagcaagaccctgtctcaaaaaaaaaaaaaaaaaaaaaagtatggccatttgagtagtttttgacccacactgtcaaattgtttttcaaaagaatagtattagcttgtgttacacagccctgtggactcacttcagtgtacatttatcagcactgggagttttcattttttttgtatgtaagaaatgacatttcggggccgggcgcggtggctcacgcctgtaatcccagcactttgggaggccgaggcgggcgtatcacgaggtcaggagttcgagaccagcctggctaacatggtgaaaccccgtctctactaaacaaaatacaaaaaaattagccaggcgtggtggcgggctcctgtagtcccagctactcgggaggtcaaggcaggagaatggcgtgaactcgggaggcggagcttgcagtgagctgagatcgcgccgctgcactccagcctggagcctgggcgatacagcgagactctgtctcaaaaaaaaaaaaaaaaaacttttcccagctgggcacagtggctcacacctgtaatcccagcgctttgggaggccgaggcgggtggatcatgaggtcaggagatcgagaccatcttggctaacacggtgaaaccccgtctctactaaaaatacaaaaaaattagccaggcatggtggcgggcgcctgtagtcccagctactcgggaggctgaggcaggagaatggcatgaacctgggaggcggaacttgcagtgagccaagatcgcgccactgcactccagcctgggcgacagtgcgagactccatctcaaaaaaacaaaaaaacaaaaaaacaaaaaacttttccccaaattatcaagtcatcattgccatactattttgaaagtacattttattgctttgtgatggtttttttttttttttgagatgcagtctcgctctgtcaccaggctggagtgcagtggtgcgatctcggttcactgcaacctctgcctcccaggttcaagccattctcctgcctcagcctcctgagtagctgggattacaggcgtgcaccaccatacccagctaatttttgtatttttagtagagactgggtttcaccatgttgaccaggatggtctcgatctcctgactttgtgatccgcccgcctcggtctcccaaagtgctgggattacaggtgtgagccactgtacccggccacatgatggctttttaaaaatcataaatgattctgtatttgtctctttctggtctatctaatctcttttactgatctctgtttacttttataaatacaagtagggagactattttattattactctttagtttcagttgttacaagtggatagtaagtacttcatggatccaaatattaggaattgatcttaggcaaaaaagttggggcaaaatgaaagcaacttatcattacagttttttgtttgtttgtttgtttgtttgtttttgagacagagtctcacggtcgcccaggctgcagtgcaatggcgcaacctcagctcactgcaaactatgcctcccgggttcaagtgattctccctcctcagcctcccaagtagctgggaatacaggcacccgccattatgcctggctaatttttgtatttttcattgtgacagggtttcaccatgttggccagggtggtctcaaactcgtgacctcaggcaatctgcctgccttagcctcccaaagtgctgggattacaggtgtgagccaccacgcctggcccattacagttttatctgcatttttctgactgcctggttctgtgctgttcctgcaacatttacttaacatatttctttgaatgctgcttcaaattttatttcaaaattgagggggaaaaataagcaaatgataaacataaacaaaattttattttccttttttgttagaggcagaatttaaggaaaaattctgatgattttgattacagttagtggctaacctcttatgatttatttacctatctatttatctttccatctatttgtacatttttttgtttgtttgtttttttggtaaacagtctctccccagtaagaatgcagttcttcttaatcacagaagttattcctttccttgtaatggccttctctgttctgtgtcttggcaaatatctgagcctaatagttgggtggtgcccttggcatagatgttatgtaaggaattgtcacctgcttttagagtcagtcatcccatgaaatcgaaggagtcagtaaggcgttatggaatcaggaggcttgtgtgacagctctgacgctgataccaattaatgacctgactggacctcagtttcctcatcagtggaatgaacacagttggcctagtgaccccagatgtctctcccaagctaacattctgtgattctcattctctgaaatgttaccacgaggaatgtttacttatacgttactttttaaaataagaaaaatggagaacagaaaatgagaactagagtttaattttaaaattttgaagtgtcatggatgaggctatcgtcatgtgtcatgttgctttagtccaatagttcttaattaacagtatgcattagaactaccagtgaacatttaaagtatatgcatatatgtgtgtgaacatatatgaatatatacacacataaatatgtttgtttatttatttatttacttatttatttattggagacagagtctcactctgttgcccaggctggagtgcagtggtgcgatcttggctcactgcaacctccacctcctgggttcaagcagttctcctgcctcaacctcccaagtagctgggattacaggcgcgtgccacaacacccagctaattttcgtattttaagtagagatggggtttcaccatgttggtcgggctggtctcaaactcctaacctcaggtgatccaactgcatcgcctcccaaagtgcaggaattacgggcgggtgtgagccacgcgcctggccacacacacaaatatgcatgcttaggcccatgccttgcaagtctgattcagtaggttagggacaaggatgagacctaggaagtcttggttattcagatgcaaataagggttgaaaggcctcccttccacttacggcagatactgcaggtatagattggtctggtatactctgcaacaaataagtcccattgctcttctgggatcctataattaattggcacagatgttagtttttcttttctttttttttctttttttgagatagtctctcgcactctcacctgggctggagtgcacgatctcggctcactgcaacctcccccgcccaggttcaagtgattctcctgcctagcctcccagtgctgggattacaggcatgagccaccgccccgggcccagagaaattacaagcgagaaattacaacaagctagtttttctttaagaagaacccacttctcattttcttatctgttcaggctggtaaaacaaaataacataaactaggaggcttatcaacaacagaaaacaatttcttacagttctgtggcctaggaagtccaagatcaaggtgccagtagattccacgtctggtgagggcccacttcctgattctcagtaggtaccttcttgctgtgtcctcacatggtggaaggggagatgggctctctggagtttctttcataactgcgctaatcccattcttgagggctcctaatcacctcccaaaggcccctccttctaatgctgtcactttgagaattaagattttgacagagaaattttagaggtatagaagcattcagatcatagcgcttatatctcaaagataaggagatttctatgttcctcttcacttttctatccatatgttaagtattagtaacatttgattgtctggtatataatgaaacagtctcttggttgttgaccctgtcttgacattgtatgataggggttatttaaaaatttcttaaattaactatctttctaaaaactatttttataaaataatacatgttcatggtttaaaaacacatagtaccaaaagtacgatgaaagtgaaagcttgccaggcgcggtggttcacgcctgtaatcttagcactttgggaggccaaggtgggcagatcacgaggtcaggagatcaagaccatcctggctaacatggtgaaaccccgtctctactaaaaatacaaaaaattagccgggcgtggtggcaggcgcctgtagtcccagctactcgcgaggctgaggcaagagaatggcgtgaacccgggaggcggagcttgcagtgaggccgagatcgtgccactgtactccagccttggcaacagagcgagacgccgtctcaaaaaaaaaaaaaaaaaaaagtgaaagcttactagacataatgattaataataataatgattaataataaacattttggggatttagctgattttattaacaccatttaaatatcagtctaggtgtagtgacagtataacatactggttaaaagcatgggcgctacctttacatttatggtcaattgatttttgacaaggttggcaagatacatcaatagggaaagattagtcttttcaacaaatggtgctgagacagcaggttatccacatgcaaaagaagaaagtggatgcctgcctcatagaacacatgcaaattaacttaaaatggatcatagtcctaaagtaagaactaaaactataagactcttacaaaaaaaataaaatccttgtgactttggaataggcaatagtttcttagatatgacaccaaaagtataagcaaaaaagaaaaagataaatttgacttgatcaaaatttaaaactatatttcaaaaagacttctatattttaaagctgttttttttaaagtgtaggttctagagaatgataacctaagtttgaattttagctccattacttattgtaagctgtgcaaccctgaggaagttgcataacctctctgagtctgtgtccttgtttgtaaaatggggatgatggtagcagtgcccacctaacgatattgctggaaggattaaatgaaaggaggcatataaacattaaccctctgtctagttctggataaatacaaatatcaactatgaagatgataaggagattgaagaaggatgaatggcttacttggatcagcagaaatgagaagaaatcacctaaggaacaagtagtaagggtgggcttgaacttggtttattcatgggccctgaagaagatggatagtttaaacatttttacaagttggaggtagcaatctcttggtggttttgactggtgatgatgcccaggatgacagtgctgtcatgtgggaataacataccactaagctggatcatgtttgttttgatgcctgattgggccagcacaaaatcctgaggagaaaataattcgcagtaagtatttttattgcagtcttgctgcatcttgcctgaagatcctgtgtctgcttatccaggagttaacctgggagaaaacatgtaagccttggtttgagtggtctgcccctatgtctgtaagcagggttgtgttggaaggggacatctgtctgacatttggcctctctgcatttaaaccatggttgggaatagagatggcataaaatgtggcctcagtatttccaacctgttacttattttcctgtgtccagggaaggttctgattatggcttgttggcaggatcccctgagaacatatcttgactgtgatctgagttaggaatattgaataatatgtcagaggttccagtcagatgaaagaagtaaatctataatcttcattagagtccttccttcctcagattccttattttggcctgtgggacttaaatggtaatgcttttagagtgaacctaatattagaaaatgcatcatcatgttttcctttgtgataattaccatccttacttccattacttctagctaaagatcatcaccctggtaaaactttgccagagaacccagcaggattcaccagcacggccactgcagactccagagccctgcttcaggcctatatagatggtcactctgtggtcatcttcagtaggtccacatgcacacgctgtactgaggtaaggctttaaactcaaggggtttaaatggaattgaaggaatttgacagacttttgagctcaaatgtaaacaactggattttacctttaggaagagtgtatgtaggctgggcgcggtggctcacacctgtaatcccagcactttgggaggccaaggtgagtggatcacaaggtcaagagatcaagaccatcctggccaacatgatgaaaccccatctctactaaaaatacaaaaattagcccaacgtggtgtcatgtgcctgtagtcgcagctactcgggaggctgagacaggagaatcacttgaacccaggaggcagaggttgcagtgagccgagatagtgccactgcactccagcttgggggacagagtcagactccatctcaaaaaaaaaaaaaaaaaaaggaaaagtatatgtaggtgtaacttgcttcagagtaattgtaaaatgtggatttgataacaaaatattgtttgaataatctttctgagcttttgggaagtatgagacatattcaggtagtcgaggtcagggaaggttagggtgggggagttaccaaaccggttgatttgcggccctttcagatatgtctgtagggaatatttcataaggaatggttacttagggtactaccaaattttgataaatatctcttcatgctttggtttattatggggaaaataacttcacaaagaataaactgtttcctacttggttcttaatcttagattatcagagagaaaaggtcagtggttacagccaaggggaggattagtttagtccaccctgaataaaccagggtggacttaaccattaacgaaggtgagaattgaaaggcaaacctgatctgtctggtgcttcataggaaggctgagggcatttaaatgtcactgaagtttagctctaggcctacacaatggagtcttaggtaaatataactggccatctgtccaggttcactgagaggttaatttattattttttatatatatatatatatatatatatatattttttttttttttttttttttttttttttgagacggagtctcgctctgttgccaaggctggagtgcagtggcgcgatctcagctcactgcaagctccgtctcccgggttcatgccattttcctgcctcagcctcctgagtagctgggactacaggtgcccgccaccacaccccgctaattttttgtatttttagtacagacgggttttcactgtgttagccaagatggcctcgatctcctgaccttgtgatccacctgcctcggcctcccaaagtgctgggattacaggcgtgagccaccgcgcccggccgattttattattaagtttaattttctctcaacttgtctgccccatgacttactttccagatctcaaggagtttgaattcagaagtctttttattctggaagccttacatagaaataaatgggcttatgggctttttggactctctctctctgtttctctctctcgttctgcatgtgtgtgtgtctgtgcacacgtgcacttttttcccaagtaaagaaaaaggaaggtgggcggcaaaaacactgaggtacggagaccctttcatccttgtgtctctcctgaacacattctgcatcgatgccaccttaggcttcatccctatcaatatgatagtgatgcctttcatgtaggacatcatattgggagtaggattgcaaagaggcagaagacacagtcccatccctgggggtttagctcaactgagggcagaacataggcttaagaagaaaaatgatctcagataacccatgctaaattctacatgattggacaggcagcaagtgctagagaatttagaagagggctgggcattagaaatctgctatgtaattcttggcctctaggggcttaattatgtagctctgcaattcttatctgcttttgggacctactgcccctcccccgcaccgcctgccacttccttttttttaatctttaaaatgaagggcttgaactagttgcttattgagggtttttttgtttttgtttttgagacagagtctcgctctgttgcccaggctggagtgcagtggtgtgatctcggctcgctgcaacctccgcctcctggttcaagtgattctcctgcctcagcctcccaagtagctgggactacaggtgcacaccaccatgcctggctaatttttgtatttttagtagagatggggtttcactatgtggccaggctggtctcgaactcctgagcttgtcgtgatcctcccaccccagcctccaaaagtgctgggattataggcgtgagccactgcgcccagcctgagggttttcttagttctgaaattacgtgcttgtctagtctttttcgttaccaaacaggttaagagcctggactctaaagtcagagtgtggatcttggctctgtgatttatcagccatgtgactttagttatttacctgtggtgccacagtttccccatctgtaaaatgtggatgataatagtatctatatcgtaagtttgttatgaggattaaattaattaatatttataaaagccatagaacatacctgagacatagtaaacactatatcagtgtttgttaaataaaagaactacttgcatttttccttttcctatcaggacttaaaaccttgggtggttaatcttccttctgtcagtactgaggctagattaaatggtaatcaacaaatacctgacataatgctaagtacaattaatcctatcagtgggtaaatagctaccatttgagtgccaactatgtgccaggcattcggtcactctactcatattttcaaacattattaaagaatcgggagctgggcacagtggcttatgcctgtaatctcaatgctttgggaggccaaggcaagaggttcacctgaagccaggagttcgagaccagtctgggcagcataacaagactctatgtctatggaaaaaaaaaaaaaaatatatatatatatatatatatcagcatggtttgcatgtgcctgtagtcctagcttctcaggaggctgaggtgagaggatcacttgagcccaggagttaaaggttacagtgagctatgattataccactgcacgccagccttggtgacagagtgagaccctgtctctaaaataaatacatatgggcgcagtggctcacacctgtaatcccagcactttgggaggctgagacaggcagatcacttgaggccaggagttcaagaccagcctaggcaacatggtgaaaccctgtctcttctaaaactacaaaaattagccaggcatggtggtgaatgcctgtaatcccagctactcaggaggcacaggcatgagaatcacttaaaactcaggaagctgagggggcagtgagccaagatcgtgcctctaagctacagcctgggtgacagagcaagactctatctaaataaataaataaaaaaaataaaaattaagaaataaataaataaacagaaaattccaattttaaccctgctgtagttctggaatgaaaagttgggctagcggtcaggattgctactagtggtagatagtcagtatgctccttgcaatcccagatctctttgacctatcattgttctttttttcttttcttttttttagtccctattatgccccagaatgttcttattcttactgttatctctgaaatctactaactccctcatttcccagctctcctgcctatccctgaaaatgtaaagccttgcctatatttcccccagttttacttaattaaaactagcctgggaatgaagaacttttcctataacatttgttggttagttatttgcatgcttatttaaacatacagttgcccgagcgcagtgactcacacctgtactcccagcactttgggaggccgaggcgggcggatcacctgaggtcaggagaccagcctgaccaacatggagaaaccccgtctctactaaaaatacaaaaattagccgggcttggtgatgcatgcctgtaatcccagctactagggaggctgaggcaggagaattgcttgaacccgggaggcagaggttgcagtgagccaagatcgcaccattgcactccagcctgggcaacaaaagtgaaactgtctcaacaacaacaacaacatatagtcatcctggcaaatttatttaatatcattatccaaacaatccctgggtatgtcaagtcttctagataaacatcccctggttttaccttgttgatttcagattgttttcagattggtgccagttaatttggaaattaattttcgatgtctttggccatgaaagatgattaggtgcttttcctggtaaagtggtgaatttcttctgagggtgtacaactcatatacttagctgttcacatttatttatttatttaaattaccttgaagtagaattttcccaggttattttctttagtttttatttaatcatctcatttaacaactgggatatgagtaaatcagaatagagaaactttgtttttatatttgtacttggtctgatgaatgtgtatttctctatgggatgagtaatgtcatttgcattaattcaaggtgggaagtgcccataaggaaactaacgtctacgtaaaggtagctttccgctcttgcataacacattagttaccatatgtgttttgcgtgcatcttgctgtgaagaggttttaaagtgcaaagataatccctctccaccttttcagaattgcaatatttatttcttatagctatttcagagtggtggggggaactgaattcagattcagactggggcttaggtgacatctaaaagagtttaagaaaaaggctactggctgcgtatggtggctcatgcctgtaatcccagcactttgggaggccgaggtgggcagatcacgaggtcaggagatagagaccatcctggccaacatggtgaaaccgcgtctctactaaaaatacaaaaattggctgggtgtggtggcgcatgcctgtaaccccacctaattgggtggctgaggcaggagactcgcctgaacccggggaggcagagattgcagtgagccgagatagtgccactgcactccactggtgacaaagtgagactctgtctcaaaaaaaaaaaaaaagaaaaagaaaaagaaagaaaaagaagactaatgaggttgtatgaatgaacatattttcccattttatcaaaatgttgaatttggtcctatagaaatgatagaaatctccgagtgtacttccatacaataggaagtactgttttagtagttaagtttagaatgagatgagaatatattttcttttctttttttttttttttcaagaatcattttcctcattgatcatctctgtgaacttcaggctactctggccttttaaattttattgtataactggaggaatatggttctaaactttcctaaattattgacaggctgtttgtgtcttgtacataaaagtctcttgtgtcagtagtttaaatgttatctagtagtataagtaacttttaaataaaattttgttttttaccagtataatttgtataaccatgagcataagattttttgtttgtttgttttatttaatagtctcagagcataataggttttttgtaactgatttattggttgagggttactcagccaaaaaagaaataatactttaactattgtagaatatatttttcccaggtttgccacataatgctttggaaacattaagtgttccaatgctttttttttttttttttttttgaaacagagtcttactctgtcgcccaggctggagtgcagtggtacaatcctggctcactgcaacctccgcctcctgagttcaagtgattctcctgcctcagcctcccgagtagctgagattacaggtgcccaccaccacgcccggctaatttttttgtatatttaatagagacggggtttccccatgttggccaggctggtcttgaactcctgacctcaggtgatccacccgtctcagcctcccaaagtgctgggattacagacgtgagccaccgcacccggcctgcttttttaaacatagtattaaacccattttataatgaggtagactgagtcactaaacatataaaatgtatcttatgaagcgatacagatgaatcattgacaattgaatagaatcaacagacttcagatactcttgtaaatatcatttctgtcaacagggagaatcttatgggttacataaaagtgaattggaaagttttcaaaggtgaaggctggttgaggaaggaagtaacaaagctggataagagattctcttgttggttataacctcatttttcattttcctccttgtttttcaacttcttccaggtaaagaagttatttaaatctctgtgtgttccttattttgtgcttgaacttgatcaaacaggtaagtttctgtttaatatgtaaatcatagctgctgactgtacattttatctcatttattctatctggctttaatttgtcttccttgaggtttttattgtttagtgagcacttgctagctgattcttctttttggtcttttagacagggtactctcctggagctaatcatattcacctttagcctttacctagtgtatagccttggtattacccagagtttcctcttattgaaattattcttcttattactcatgaatctagttacagatacagtatttgctggttttatggtaactttacttttgcaaatttgtctcctttctgataagtaatacaaatagtatttgaattaaatataaactgagatgcattcagaaattttggcagggacatacaaagatcagtaaaggtgaaagatccatgaaaagtgctactgggaaatcccagggagagaaagattggtggagtaaaatggaaagcttctttctaggaccatggtgctccttttttgtgggtcagaaaatcccaagggctcacagacaaacattattaagaatctaatctaggcctgttggtgactcatgcctctaatcccaacacactgggaggccagggtagtaggatcgcttgaggccaggagtttgagtccagcctgggcaagagtgagagcttgtctctacaaaaataaagaattaaaaagttaaccaggcacagtggcatgagcccatagttctagctactcaggaggctgaggcaggaggtttgcttgagccaaggagttcaaggttacagtgagctatgattgcaccattgcactctagcctggattactgagtgagaccttgtatcgaaaaacaaaaaggatctgctagtggccagcaccatcatttctattaggaaaagtgggctcttccagattaggaagaggaggtaaacttcatgcctagtagctttaaggaagcagagtcctgggcattgacagcttctgctcagtctccaaaggaatacaaagaaagggcctggcatggtggctcgcttctgtagtcccagcacttggggaggctgtggtggctggattccctgaggtaaagagtttgagaccagcctggccaatatggtgaaaccctgtctctactaaataataaaaaaaattagctgggtgtggtggtgtgcacctgtagtcccagctacctgggaggctgaggcaggagaattgctggaacccaggaggcagaggttacactgagccaagatcgcaccacagcattccagcctgggtgacagagtgagactctgtctcagaaccacaacaacaacaacaacagcaacaacaaagaaaggattcaactagacagagaaagatatatggcaattgggagatatgaacaattggcatataagtttcatttcttttttttttttttttttgagatggagtttcgctcttgttgcccaggctggagtgcaatggtgcgatctcagctcaccgcaacctccgcctcccaggttcaagcaattctcctgcctcagcctcctgagtagctgagattacaggcatgcaccactacgcctggctaattttgtatttttagtagagatggggtttctccatgttgaggctggtctcgaactcctgacctcaggtgagccgcccgcctcagcctcccaaagtgctgagattacaggtgtgagccaccacgcccggccataagtttcatttctagggtcaggaggaaggaggtagttgtgtggcaagacatattacttgatgtttctaaagacaggttctctaacacagagagcatcacataataactaccatatatagagtgttagtccctgttttacatggactatgctgggttaagtatagtcacctatcctcacatgaactcagcaagggagatattctctatattttataaatgaggaaattgaatcccagagaagtcaattaacttccttaacattgacccggtgcagtggctcacgcctgtaatcccagcactttgggaggtggaggtgggaggattgcctgaggtcaggagttcaagaccagcctgaccagtatggagaaaccccgtctgtactaaaaatacaaaattagccgggcatggtggctcatgcctctaatcccagcactttgggaggcagaggcgggaggattacctgaggtcgggagttcaagaccagcctgaccagtatggagaaaccccgtctgtactaaaaatacaaaattagccgggcatggtggctcatgcctgtaatcccagctattcgggaggttgaggcaggagaattgcttggacccgggaggcagaggttgcggtgagccaagatcacaccattgcactccagcctgggcaacaagagcacaactccatctcacaaaacaaacaaaaaaaaaacacaaaaaacaacaacaacagaaaacttccctaacttcatataaatactggatctataatttgaacacaggcccatgtaattctgaagcctgtgttatttccataataccatgttgtctggctcctctacggtgacccttctattccttcatcaaggaaggctcttgcccctaaatactccatagtatgaaaggtaatctcaataaataaaatttcttctgggtccaaaagtagccttttataaaaatataaattttcctgggaaacttaagtcacttgcaacttgctgtgaattagggaaaaataaccaaacggaacaataaccaaacaagcaaattaaactaatataagataaagcaaatgaacatgtccttcaaggatgggaaaggtaaaggaggtaacatcggaagagatgggcaggatgaatgcactaagtgcttggggagcatgatttgtaaggatttactctctgaatgtggaaaacttgtgttttttggtaacaaatggcagatgttttatttctaaatctgttagtaagtggctaaggaagttttaagagtctgtgatttaatacatgtatgaactttattttcagtcccagaaaataagcattggattatgaattgacttttgtcccggtggttccccagttatacttcccttgctctttctttctttttttttttttaattgagatggagttttgctcttgttgcccaggttggagtgcgatggcacgatctgggcttgccacaacctccacctctagggttcgagcgattctcctgcctcagcccccagagtagctgggatcacaggcatgcgccaccacggccaatttattttgtatttttggtagagacagagtttctccatgttggtcaggctggtcttgaactcctgacctcaggtgatccatccacctcggcctcccaaagttctgggattacaggcgtgagccaccatgcccgtcccccttgttctttcttaaatgtcctctttactttctctatcatttttcagactattcttatcttttttaaatgtgtgttgccagtggggaggtgcggtgactgaaaaatctattaaatttctccttttccaactacttttctgtgtgagactggatttttcatttacttctgccaaaacaacgtatattgcaacaaattaatccagaagcaaatatgggaatctagttgttttttattaggaccaatgctaaaaaaattcaaaaaaatgtgaaacaatgccagtcttctcactatgtttatttattttgagacgaaataagtgcattctcagctcagtgagcaaaggtgcaatctcagctcactgcaacctctgcctcctggattcaagcaattctcctgcctcagcctcccaagtagatgggattacaggcatgtgccaccatgcctggctaattttgtgtttttagtagagacaggttttcaccgtgttggtcaggctggtctcaaactcctgatgtcaggtgatccacctgcctcggcctcacaaacttttgggattacaggcgcgagaccagcttggccaacatggcaaaatcctgtctctactaaaaatacaaaaattagccaggcatggtggtgggcgcctattatcccagcgactcaggaggctgaggcaggagaattgcttgaacgcaggaggcggaggttgcagtgcgctgagattgtgccattgcacttcagcctgggcaacaagagcaagactctgtattaaaaaaaaaaaaaaaaaaaaaaaagaccaagtttgacaccccgttctaaggcaagtaggaagcatgaatattaacacagttttgattttgtgagatttatttgtcccaagcataggaggaacaccgttctacatgtgcagttggccttagccacacaggagaggtgtgatctggttcatgtcttcgaggagcttgtaatcatggagctggaactgctgatgcagtcttctaagtgctggtttcatgaataaacacctcctttatctgtttcttctgggttccaaaagaaccctccataggcatgattttcacaccagtgttggctacgtaatcttcccagggcctggatcatagtgggtatttaaaaagtcagaagatcaattggtagacaggagtatttggcatagaatcacatgggtgcatttattcattcagcatatttattgagtgcctgctgtgcactaggctctgtatactaagcactgggaatacagtagtatactaggcaggtgtgcttcctgtctaaaggaattagacttgtttgtgttttttttttcttttttttcccagcaaattccttttattttcctttagagttgagggcctgtgtactgcctaactggattggtaatggagtgagtgccccatgaattcctgtgtttgcaatagtatcacctctcacagaaaatcaagaagagaagttgtgctaccaggggatcctctctcttcaccctaacattttcttcttccttcttttggctgtattttggccagtctacataaattaaggttattatttgaaaacaaccatcagggtccactgagttctactgagattggtattggagagagaaactcagaaccgggaggcctggcattcatgtcctgtgtgtaggtagtggtagtagtcatacatgctatcctccttgtgccagaggctcatgcatgttctcctatttaatcttcagaataccaccaatcaggtaggtggtgatatcaccttcttatgatgaggaaataaaaacatagtaaagtattagtatacagggtggctggctttctagtgaacctactggcaattcgtggcccctcccactacttcctgagactatctcgtagaaccttccatgacttgcccccagtgtcttatgtataatgttcatggtgtcgatatcatgataggtgttcctagatgtgatggtgtctgttgcacacacatgtggtggtgtgtttggtggcagaggttgtacaatctgccaccatgccagctacacacatcttggctatccctgtggatgagctgccactcacagggcctgttgatttacaaagacttgtatctatacttcaggtgtcttcctaggagctttgatctaaggaacagacaacatcagtgtaatcatcttaatttggtctggcagctgctgacattctatagctataaatgtggaaaacagacataagatttcaggagtttgccaaaagtgtgcatctggatgccacatgtcactagcttaggggttctgatgtgtattattcatgtctcctggctgcttatggaggacatggctttaatgccttcagcaagagggagaggaactaatatttgagtttctttttatggcagtgtctcatatctctcttacttaatcctcacaacagctttgtgtggttgttggaattaattctgttgttgtgaggaagcagatgctcagcatttgaataacttgctcaatgttgctgtgtcaagcccaggcctgtctgcttccctagttgcctctttggcattgttttccttgaacaaataaaaacccctcacaagcagaggtaccctagctagctcagttctcaccactttggtattgatacttactcattcaacagatttgctttgggcacctatttatatgccaagcactggcaggagagaaaagatgagtaaggcacaacctcattctttaagatcattttacttgtttgcctctgcctcacttccaatttcagtgtaatctggtatctctaaaggctgtaggatcacgggtggacaaaggtagtgggtaagacatttaaagctgtaaacaaaagcaacttagaaaacatcatggcatgttcatttagagcaaaactggcaaggcctggggcagagaacgatgagaggttaagagttgaaaagtaaagaggctttctcccatagcgaatgaggagacatgggaggttgttctatttattttatgaatgaggctcaaaatattctttaagcattttggttttgtctataaaaatgttaatttttttaaatttggagaccacagtataataaaatacaaaaaatcacatataattgcatccagagatagccactattaatattttatgtcttttttgtaaactctgttctgttttattatttaatattttacatgttatataagttcttaattttctcaatgactacaaaatagtccatgtatttacttagccattctactatatttggacagtctattgccaattttttgctattgtggaataataggttagaaatgtttttctttgtacgtgaagtttttgctgtatttagaattattttcttaggatagattactggaatggatttatgggtcagagtatgaacaattctaaggttctagagccctttaaatggtgtgtactaattaataacttcataagctcaaagagttccctgtacttagtagtaagaaataataataggttttgggccaggtgcagtggctcctgcctgtaattccagtgttttgggaggctgaggcaggcagatcatgaggtcaagagatcaatactagcctggccaacatggtgaaaccccgtctctactaaaaatacaaaaattagctgggcgtggtggcatgcgcctgtagtcccaactacttgggaggctgaggcaggagaatcgcttgaacccgggaggtggaggttgcagtgagctgagatcacaccactgcactccagcctggtgacagagtgagactccgtcttaaaaaaaaaaaaaaaaaaacttccttttgcgggtggcggcgaacgcggagagcacgccatgaaggcctcgggcacgctacgagagtacaaggtagtgggtcgctgcctgcccacccccaaatgccacacgccgcccctctaccgcatgcgaatctttgcgcctaatcatgtcgtcgccaagtcccgcttctggtactttgtatctcagttaaagaagatgaagaagtcttcaggggagattgtctactgtgggcaggtgtttgagaagtcccccctgcgggtgaagaacttcaggatctggctgcgctatgactcccggagcggcacccacaacatgtaccgggaataccgggacctgaccaccgcaggcgctgtcacccagtgctaccgagacatgggtgcccggcaccgcgcccgagcccactccattcagatcatgaaggtggaggagatcgcggccagcaagtgccgccggccggctgtcaagcagttccacgactccaagatcaagttcccgctgccccaccgggtcctgcgccgtcagcacaagccacgcttcaccaccaagaggcccaacaccttcttctaggtgcagggccctcgtccgggtgtgccccaaataaactcaggaacgccccggtggaaaaaaaaaaaaaaaaaaagtgatctggctggacaaactgagccagtcccacacaaaatcttaaaaaaaaaaaaagaaaagaaataataataggtttttaaaaatcattatttgcctattggagaggtaaaaacagatttctttatcttaatttgtatcactttgattattaatgaggcacaatattttttcctgtatgttgtatttcctatgtgtaccttgctgggctcaggtggtcctcccaccttagccttccaagtagctgggactatctaaattgtagtcactgtgttgtatttcattatctgaattgcctgttcattttcctcatgggataataatactaggaagagccccggtgcggtggcttacgcctgtaatcccagtactttgggaggctaaggtgagtggatcacgaggtggggagatcgagaccatcctggccaacatggtaaaaccctgtctctactaagaatacaaaaattagctgggcatggtgacgcatgcttgtagtcctacctactagggaggctgaggtaggagaatcgcttgaacccgggaggtggaggttgcagtgagttgagatcacgccactgcactccagtctggtgacagagcgagaattcatctcaaaaaaaaaaaaaaaaaaaattagttggctgggcgtggcggctcacgactgtaatcccagcactttgtgaggccgaggcaagcggatcacaaggtcaggagatcaagaccatcctggctaacacggtgaaaccctgtctctactaaaaatacaacagggccgggcgcggtggctcacgcctgtactcctagcactttgggaggccgaggcgagcggatcacgaggtcaggagatcaagaccatctggctaacagggtgaaaccccgtctctactaaaaacacaaaaaattagccgggcgtgttggcgggcacctgtagtcccagcaactcgggaggttgaggcaggagaatggtgtgaacccgggaggcggagcttgcaataagccaagatcgagccactgcactccagcccaggcgacagagcgagactccgtctcaaaaataaataaataaaataaaataaaataaaaataaaaaataaaaatacaacaaattagccaggcctggtggcgggcacctgtagtccagctacttgggaggctgaggcaggagaatggcctgaacccgggaggcagaacttgcagtgagccgagatcgcgccactgcactctagcctgggcaacagagtgagactccctctcaaaaaaaaaaaaaaataatataataattaataataataggaagaaacctttatatatagctctttattttcttttctctttctttctttctttctttctttctttctttctttctttcctctttctgtctgtctgtctgtcttgctctattgcccaggctatagtgcagtggtatgatcttggctcactgcagccttgaactcctggcttcatgcaatcctcccacctcagcctcccgagtagatgggagtacaggtatgtgccaccatacccagctaatttttgtattttctgtagagctggagtctcatgagccaccatgcccagcctgccttacttcttcctttccttctttcctttcctttcctttctttcttttttctgagactatcccgtagaaccttccatgacctgccccacctgtcttatgtataatgttcatggtgttgatatcatgataggtgttcctagatgtgatggtatctttctttctttctttctttctttctttctttctttctttctttctttctttctctctttctttctttctttctctttctttctttcctttcttccttccttccttcctccctcccttccctttccttcccttccctccttccttccttctttccttccttccttccttccctccctccctccttccctccttccttcctctctctctttttttttttgagactgagttttgctcttgttgccctggctggagtgcaatggcgtaatctgggctcactgcaacctccatctcccgggttcaaacaattctcctgcctcagcctcctgagtagctgggattacaggcacctgccaccacgccaggctaattttttatatttttagtagagacagggtttcatcatgttgtccaggctggtctcaaactcctgacctcaggtaatccacctacctaccttggcctcccaaagtgctgggattacaggtgtgagccacttggacccggccccttcctctttctctctgtctctctctttctttcttttattttttatttttattttttgaaatggagtatcactggctgggtgcggtggctcacgcctgtaatcccagcactttgggaggctgaggtgggctgatcacgaggtcaggagatggagaccatcctggctaacatggtaaaaccccgtctctactaaaaatacaaaaaaaaaacccacccatattagccgggcatggtggcaggcgcctgtagtcccagctactccggagggtgaggcaggagagtggcgtgaacccgagaggctgagcttgcagagagctgagatcgcgccactgcactctagcctgggtgacagagcgagactccgtctcaaaaaaaaagaaagaaagagagtatcactctgtccccaggctggagtacagtggcacgatctcggctcactgcaaactctgcctcccaggttcaagcaattatcctgcctcagcctcctgagtagctgagactacaggctgcactaccacgcctggctaattttgtatttttagtagagacggagtttcaccacattggccaggctggtctcgaactcctgacctcatgtaatccacccgccttggcctctcaaagtgatgggattacagtcgtgagccaccgcacctggcgtacagtagagcttctttcaaaactggaaccaatcctctcaaaccctgccactgcttatcaattaaatttatgtcatattataaatccgttgttgtcatttcttttttttttttttttttgagatagagtctcactctttttgcccaggcactatctcaactcactgcaacctctgcctctcgggttcaagtgattctcctgcctcagcctactgggtagctgggattacaggcgcctgccaccatgcctggctaatttttgtatttttagtagagatggggtttctccatgttggccaggctggtctcaaactcctgacctgaggtaatctggcccgcctggcctcccaaagtgctgggattataggcgtgaaccactgtgcccagcccttgttgtcatttcaacaatgttcacagcatcttcatcaggagtagattctatttctagaaaaacattatttgctcatccataaaaagcagctcctcatccattcaaattttacatgagattacattaattcagtcatgtcatcagactctattttttgtgggttctttttttcttctttttctgtgtttctttcttttttttttttttttttgagacagggtttcactctgccacccaggctgtgctgcagtgatgtagtcatggctcactgtggcctcaacctcccgggctcaagtgatcctcctgcctcagcctctcaagtacttgggactacaggcacatgctaccacacctagctaatttttgttgttgttgttgttgagatggagtcttgctctgtccccaggctggagtgcagtggcgcgatctcggctcacagtaacctctgcctcccaggttcaagcaattctcctgcctcaacctcccaagtagctgggactacaggcacgcgacaccatgcccagctaattttttttgtatttttagtagagacagggttttatcatgttggccaggatggtctcgatctcctgacctcgtgatccgcctgccttgtcctcccaaagtgctgggatgacaggtgtgagcccccgcgcccagcccacccagctaatttttaattttttttgtagagacagggtcccactatgttgcccaggctagtcttgaattcctgagctcaagcaatcctacgttggcctcccaaagtgctaggattatagatgtgcaccaccatgcctggccttctcttctaattctatttctcttgttatttccaccatatcttcagttacttcctccactgaagtcttgaattcatcaaagttactcataagggttggaatcaccttcttccaaactcctgttaatgttgatatattattgacttcttcccatgaatcatgaatgttctgaatggcatctagaatagtgaatcttttccagaaggttttcagcttactttgcccagatctgtcagaggaatcactgtctatggcagctatagccttataaaatatatttcttaaataataagacttgaaagtcaaaattaatcctttatccctgggctgcagaatggattttgttagtagtcatgaaaacaacattcatctccttgtacatctccatcagatctcttgagtgaccacatgcactgtcaatgagcagtaatattttcaaaagtcttcttttctgagcaataggtctcaacagtgggcttaaaataaaccaagttgtaaacagatgtgctgtcattcaggctttgttgttccatttctaaagcaaaggcagagtagatttatcataattcttaagggccctaggattttcattgtaagtccatttgtctcctgtttaaatcataagtatagaaacaccttaatatggccattatttgatagtagtgacatggaaaatactttgccatcttagaaagggcaatgactaaatactggcctaatgtatgtttttcctccgagaaggaggaaagccacttaatggtcaacattgaatcctgtcaagcagagtaggaggcaatatagcctcctttatagcaatacagcctcaggatattcctgagattattgaaagattaactagccgggtgtggtggctcacgcctataatcccagtactttgggaggccgaggggggtggatcacctgaggtcaggagtttgagaccagcctggccaacatggtgaaaccctgtctctgctaaaaatacaaaaaaattagccgggtgtggtggtgcaagcctgtaatctcagctactcagtttcacgtgcatccgtgtgaaaagaccaccaaacaggctttgtgtgagcaacaagcctgtttatttcacctgggtgcaggcaggctgagtcagaaaagagagtcagcaaagggtggtgggattatcattagttctttcttttttttttttttttttgtgagacggagtctcgctctgtcgcccaggctagagtgcagtggtgcgatctgggctcactgcaagctccgcctcccaggttcatgccattctcctgcctcagcctcctgagtttctgggactacaggtgcccgccactaattttttgtgtttttttagtagagacggggtttcaccgtgttagccaggatggtctcgatctcctgacctcgtgatctgcccgccttagcctcccaaagtgctgggattacaggcatgagccaccacacctggccatatcattaaatgttcttataggttttgggataggcggtggagttaggagcaatgttttgtgggcaggggatggatctcacaaagtacattctcaagggtggggagaattacaaagaaccttcttaagggtcagggagattacaaagtacattgatcagtcagggtggggcagaaacaaatcacaatggtggaatgtcatcagttaaggctattttcacttcttttgtggatcttcagttgcttcaggccatctggatgtatacgtgcaggtcacaggggatatgatggtttagcttgggctcagaggcctgacactcatgaggcagaggttgcagtaagccaagatcacatcaatgcactccagcctgagcaacagagcgagactccatctcaaaaaaaaaaaaagtagaagaaagaaagatgtatttggattcactttaagaaagagcaaataagcatttagggccaggcgcggtgactcacccctgtaatcccagtggccaacatggtgaatccctgtctctactaaaaatacaaaaattagccaggcatggtggcgagtgcctgtaatcccagctactctggaggctgatgttataagtaaagtttcggtgccgcaaaagaaatagcactggaatataaagttttcttttgaattctcagcaaggcaagttacttctatagaagggtgcgcccttacagacggagcaatggtgagcacacacttcgataagggagaggaaggggttcttatccctgacacacgtggcccctgctgctgtgtctttcccctattggctaaggttagatcgcaaaggctaaacattccaattcactaatttaaagagagggacagggtgagtggtttggtgggaaaaatcattatgacagagcaggtaatcggaatgagtcagggtggggtaggtaatcggaatgacttaagggtggagcagataatcggaatgagtcagagtggagtaggtactcgaaaaggttgctttacgaggaagttaagtttaaaagtagaaggcaaaagtcccggcgctgtggctcacgcctgcaatcccagtactttgggaggccaaggcgagcagatcacgaggtcaggagatcaagaccatcctggctatggtgaaacccagtctctactaaaaatacaaaaaaattagctgggcgtggtggcgggcgcctgtagtcccagctactcgggaggctgaggcaggagaatggcatgaacctgggaggcggagcttgcagtgagcccagatcgcaccactgcactctagcctgggcaacagagtgagactccacctaaaaaaaaaaaaagaaaagaaaaaaaagtagaaggcaaagaattgaacatactgacatattgattctttgaaaagaaatttagaactcatatctaacactgaggcaggagaattgcttgaacctgggaggcagaggttgcagtgagccaagatcacatcattgcactccagcctgggtgacaagagtgagactccatctcaaaaaaaaaagcatttaaaatctatagataattttcagtctccggctgcggctgcgaaagaagccgccatgtctgcatatctgcaacgggtggttggcactgctccagtttcctgatcaagaggaataagcagacctacagcaccatgcccaataacttgaaggcctgcaactgcttccactacaatgggcttattcaacgcaagactgtgggcgtggagccggcagcccacggcaaaggtttcatagttgtgaagcagagatccagccagtggaagcctgccaccttctacatgcagaccaccattaacaagaatgctcgggcagggcggggtggctcaggcctgtaatcccagcactaatgggaggcggaggtgggtggatcacaaggtcaggagttcgagaccagcctggccaacgtagtgaaaccccgtctgtaataaaaatacaaaaattagccaggcatggtggtgcgcgcctatagtcccagctactcaggaggctgaggcaggagaatcgcttgaacccaggaggcagaggttgtggtgagccgagattgcgtcactgcactccagtctgggcaacagagtgagaatccatctcaaaagaacaaacatacaaacaacagaaaaaaacaagaatgctcgcgccaccctcagcagcatcagacacaggatcctcaagagcaagtaccgccccgacctgcgcgtggcagccttctgcaggccagcgccatcctgcacatccagaagcctgtgatggtgaagaaagaggaagaggattagaaaacctgcccccaaagcaatagtcagctggctttctcaaaaacaaaaacatgaatcaagaggtcaggagatccagaccatcctggctaacacggtgcaaccctgtctctactaaaaatacaaaatgtagccaggcgtggtggcgggcacctgtagtcccagctacttgggaggctaagacaggagaatggtgtgagttctccgggaggtggagttgcagtgagccgagatagtgacactgcactccagcctgggcgacagagcgagactccatctcaaaaacaaaacaaaacaaaacaaacaaaaaacaaaaaatctatagataaaggaattcagatatatactggtggagaactataaggttctcatctgtctttggggtggagaaattggtctgaatgcctcttaatgagacataggtcactctcaattcaaaccagggcctagagcattagaaagatccaaggctccttcaggcccagctccatgaagtgaccatagctttccattaacgactggtagccatcaactgtctcgggcttctgggattttggctctcagagaaattagagggggatgttcttctcaagatcaactatctaatagtgtttaagaatttagaggttaataataataagctgccgggcacggtggctcacgcctgtaatcctagcactttgggaggccgaggcgggtggatcgcctgagttcaggagttcgagaacagcctgggcaacacggtgaaaccctgtctctaataaaatacaaaaaaaaattagctgggcgtggcagcgtgcacctgtagtcccagctactcggtaggctgaggcaggagaattgcttgaacccgggaggcagaggttgcagtgagccaagatcatgccactgcactccagcctgggtaacagagtgagactccatctcaaaaaaaaaaaattaataataaaaaaaataataataataagctatatggcacttctttcatcttaggttctaatagctgtttaccactactaattagtatgtaactccttggctggtggtgagggtggttgatctgcacttttatgagatgaaacatctgagagttgactggaatggagcctgtacctcttgaggtacttctggtcagtggttttctacctgaaaactttttctttcctctaagattgaaatgggacactgagcgaccaaaagcaaatggattgcagaagggaaatattctgcatgtactagcatgtgcatattacgcatgtgtgtacatgtaatgcagaatgcaggcactaatttttaaagaggtttttcatgttcctttcactccttttagcaagttgtttaagaaaattatgtttttctagccaggtgtggtggcgcatgcctgtaatcccagctactcgggtggctgaggcaggagaaccacttgaacccaggaggcagaggttgcagtgagctgagatcgcaccattgcactccagcctgggcaacaagagccaaactccatctcaaaaaaaaaagaaaattatgtttttcttcttctggcaagaaaagacaagctctgggtaatgagaatatatgcactgcggaaaatggcatgcttagccacagactgcttgctaattaaaagtaaaatgaaaaaatgaatgtgctactccaggctggagtgcaatggtgcaatctcggctcactgcaacctctgcctcccaggttcaagcgattctcctgcctcagcctcctgagtagctgggattacaggcatgcaccaccatgcctggctaattttgtatttttagtagagaaggggtttctccgtgttggtcaggctggtctcgaactcctgacctcaggtaatccaccggccttagcctcccaaaatgctgggattacaggcatgagccactgcacccagccttgagttaagttttgatcggtgtccactgtaatgctttgttgacagttactgtgaatgaccaacctgtaaaaggggaaaatccaaacttctaaccacactgaggtcatcatggatttataccatgcatgaggacataatgattataataactaagctattgagtcttttacatctatttacatcctttacatctatttactcatctcgttttccacaatcaccacatgaagtgtagatactgtatttatcaccattttatagatgagtaaacaaaggcacagagaggtaacagaagttgcctaagggcacacagtttgccagcagaaaagccaggttacgtgatttcattgcgggctcttataactattgagctatactgcttgttagtagaacgccagatgatgctatgggattagcccagagatttacaaaagaggagacctgggcacatttgaaggcggaatggcttaaacggccctgaatacaagataggaagaggatgttgaagaaaggtggggtcccctaagaccacttggaattgggataggttataggttgtagtgctctggtaaaggcgagctttagcagaggtagaacaatccttattcttctgaggttgcagtgacatgtaagtatagagagctgctgggaagagaagacagagaagtgaaagtaacttgtacctgacgacttgagcctttgggcagtgtgctggagctggctcgtaccagctcaagagaccccttgttaaacatcaaggaattttgcaagtaggttggtagcttgaaattagccaaagtgggagtattcaactccagaaattagcaaatactacaaatcagggcctccccaccaccactcagaactggtttaccagaacaccttacactccctttcttctcttttccacttcactaacagtcaaaagcctgctgaagtgccagttgaatttgaagcttgagtgagtgcccattatgggaaaggcactgtgccagatgccagggtaagaaagaccaacccctcaagtaaataatactgtggtggagagtgaagagcatgcaggcgtaaatcctggactagctgtcggctcttgggacagtcacttaaacttgggttactcatctgtaaatggagataataatatatatcccaaagggttattgagatgactgagaacatgtaaagttcctggcacagaggtgttcattaagtgatggttctaagagtggggacatgtaaacagatgtctttcatatagcttgatataagaaataaagatgggagccgggcacagtggctcatgcctataatcccagcactttgggaggctgaggtgagaggactgcttgagcccaggagtttgataccagcctgggcaacaaagcgagaccctgtctctacaaaacatttttttaaatgaagcataggccgggtgcggtggctcatgactgtaatcccagcacttggggaggccgaggcgggtggatcacaagatcgggagatcaagaccatcctggctaatgcggtgaaaccccgtctctactaaaaatacaaaaaaaaaaaaaaattagctgggtgtggtggcgggcgcctatagtaccagctactagggaggctgaggcaggagaatgacatgaacccgggaggcggagcttgcagtgagctgagatcgcgccactgcactccagcctgggcaacaaagtaagactctgtctcaaaaaaaaaaaaaaaattagtcaggcacggtagtgtgtgcctctggccagctacttgggaagctgaggcatgaggatcatttaaacccaggagtttgaggctgtggtgagctatgattgtgccactgcactccagcctggatgacagagcaagattctgtctccaaaaaacaaacaaataaacaaaagaaataaagacagaatgactacaggtcatagtcccctcagtagattccagagttttcagggtggatgattcatggatgattttccttgtttgttatcagaaggttaccggggttttttttttgtccctacaaatcaagtttaccggatttacttgttgtttttaccggtttttagcctgttcctcactctatattatttaattgtaagacaaacaatggatttggaggtaggcacagttggatttatataccagctccaacacttacctggtttgtgacctttggcaagattctttttttttttttttgagacgaagtctcactctgtcacccaggctggagtgcagtggcgtgatcttggttcactgcaacctccgcctcccgggttcactccattctcctgcctcaccctcccgagtagctgagactacaggcgcctacaaccacgcccggctaatttttttgtatttttagtagagagggggtttcatcgtgttagctgggatggtcttgatctcctgaccttctgatccacccgcctcagcctcccaaagtgctgggattacaggtgtgagccaccatgcctggcctctgatcaaattctttttttttttttttttttttttttttttgagacggagtcttgctctgtcgcccaggctggagtgcagtggcgtgatctcggctcactgcaagctccacctccccggtccacgcctttttcctgcctcagcctcccgagtagctgggactacaggcgcccacccccaagcctggctaattttttgcgtttttagtagagacgggtttcaccattttagccaggacggtctcgatctcctgacctcgtgatccgcccgccttggcctcccaaagtgctgggattacaggcttgagccattgcgcccagcctaattttttttttttttttttgagatggagtctcactctgtcacccaggctggagtgcagtggtgccgtcttggctcactgcaacctccacctcccgggttcaagcagttctcctgcctcagcctcctgagtagctgggactataggtgcacgccaccacacctggctacttttttgtatttttagtagagacagggtttcaccacgttggccaggctggtcttgatctcctgacctcgtgatccgcccgcctcggcctcccaaagtgttgggattacaggcgtgagccaccgcacccagcctctgatcaaattcttaaaggccaaattacctttataaaactgaggaccccctaacatttaccttgtaaaagcttttttttctccttttctctgtgaaaaagatggaatatacaaattaactaagtaatatctgcatttttacagatttaatctctcaacaattatttattgatcaattactatgtgtgcatactatattaagtgctgggaacatgatggtgagcataactaatcctggtccctgctcacatgtggctatgtacatctatattaattaaacttaaataacattagaacttcacatccacacctgtactagccatcttttatgtacttaatagtcacatgtggtgagtggctattgggttggacagtgtagatttagaatattttcatcaccacagaaagtcctcttggactgtgctattctagagtgagggaggtggacattgatcaaatactcataaaagtatgattgcaattgtagtaagtactaggcagaaagaatagatggtaacatgagaacatttcatagggggatttgacttctctgttggttttcccaaggaaaacctgttcaaactagatttgctcaatgcttggaagttagcaaagccctgtggtgggagggaggacagtaattacagggactgaaagcaagctaatgactgaatcatggggattgaggagaagtttgggtgagatgaaggggtggaaggaccacaaagggccttgtagaaagaagatgaagaagcagagaggcttagtaacttggctttgcagttagtaatagaacctggatttgacttcaaagtctacactgcataataagggtatattcaacagactttggttctgcaattatctctttttgctccttctttggaaattgccaaagttccctctactggattattcctttagcataaaaacatgctgtaataatttccttcttagacaaaccaaaaaaaccaaaaagtctggccaggcacggtggctcacccctgtaatcccagcactttgggaggccgaggagggtggatcacgaagtcaggagttgaagaccagcctggccaacatggtgaaaccctctctctactgaaaatacaaaaattagctgggtgtggtggcatgcacctgtagtcccagctactcgagaggctgaggcaggagaattgcttgaacccaggaggcagaggttgcaatgagctgagatcgtgcctctgcactccagcctgggtgacagagtgagactctgtctcaaaaaaaaaaaaaaaaaaaaattcctctatcctacatccctctttagctcctttcctattgttgttttgttttgttttgtttttatagcaaaacccctttaagagttgcctatacttactccctccatttccttattttctgtttcttgctgaacttcttctaattaggatttcttacctaccaccattttcataagtgacctccatgactcagcccttaccttataggatttcttggcagtgcttgaaatagttgatcttcctttttggagcacttcttcattggcttctgagacaccacacagtcttggttttcctcctacctcctgccagctccttcttaggctccattgctgggttcttttccccttttgcagtttgagcgtgccagggctctgtcctgggccatctttatttctctaaatacattaactcctgggtaatttcatctagtcccatggagtgacagttaattttatgtgtcaacttggctagcatacggtgcccagttgtttggcagataaaagcatagatgttgctgtgaaggtattttttagatgtgacttacaatgaaatcagtaggctttgagtaaagctagtgaccctccataatgtggatgggcttcatccaattagttgaagaccttagagaaaagatggaggtttcccaaagaggaagcaattctgcacccagaccaccgttagtctcaagattgccacatcaatgcctgcttgaatttccagcctatcagccagccttggagttttcagacttatcagccctcacaactgtgtgagtcaattctttaaaaaaaagaaaagaaaaaaatctctctatatatacatgtatcctattggttctgtttctctgaagagctgtgactaatacacatggtattaaatatcttttatgtttgacaccaaatgtttatttctagccttgacttctcccttgaactccatacttacatatccaactgcttagtcaacctctccatttggataataatagatctgttaacccatactatggatttgtcccaaactattgttttcccccacctcccatctttcttcctcctctctgggtgttcctgcttttcattgaagagtgctattatttaccccattgctaaagccagaaatctagcgttatcattgattctctttctcttacatctcttattccatccatctgtacaactgtacaacatatatctgtgcaattagctttaccttcaaatgtattttttaacctcactaatcagcctttatcatctctagcttggaccaggacagtaacttcctagcaggtctgtatatctccatatctccactttttttttttttttttttctttttgagatggagtctcactgtgtcgcccgggctggagtgcagtggtgggatctcggctcactgcaaactccgcctcccgggttcacgccattctcctgcctcagcctccccagtagctgggactacaggcgcctgctaccacgcccggttaattttttgtatttttagtagagatggggtttcactgtgttagccaggctcatctcaatctcctgacctcgtgatccgcccgcctcagcctcctgaagtgctgggattacagacatgagccaccgagcccggccatatctccacttttaagtccctgccctccttagcctattttccacacaactgagcaattattttatcatacaacaatcatttccttctcttctcttcacactctggcatcttaccacatttaaaatgaaatccaaaatcctgactatggcctgatgatggatgtgacccctggctattcctctgacctcacttcctaccactttttttctcactcattaggctttagacatactggttactttgtggattcttggataagtcaagcagactcctagcttagggctttagtatgttgaagccagaataaaaatgtgagacaagtctctaaattaaaattttttatttggaaagaaagaatagcaatttggggcatatatgcagacagggtggtcttcagtatgtctgaagaacaaagagaaggttagaggttttagaaacaggagagctgttacatattgctcttcaagaaagttctttgggactagttagggtttggggagctagcaagctctggtgagtgatggcagtgggcaaaattagtcctagagtttcagcaagttctcttagcatttatagataaagctggtctcaggttacaacaggcagtttcagcagtcaggcttgcagagaattacattcttggagcaatgttttgtaccctgagtgcttttccccctagccccttggctctgatttaattgggaatgacaagaatgacccaattttatgatcagctttcacaagtacctcctctttcctctgcttagaaagatttcttccctaggtactctcatggcctgttccctcatagcactgtgggctctgctcaagcatcacattctgagatctttcctgacttccctaccctactttattcttcttcaaggtacaaagaactctttcagaaaagctttgtgtgtgtgtgtgaaggagagcaatgaaatggggtggtggtaactgcaagggttggggcacatgggatcatgagagccttttctttctttttgggaacagttttgctctgtcatccaggctgaagagcagtggcatgatcatggcttactgcagcctcaaactcctgggctcaagtgatcctcccacctcagctttccaagtagctaggactacaggcaggtaccaccacacctggctgacttttataattttttttgtagagacaaggtcttgctatgttgtacacactagtcttgaactgctggcctgaagcaatcctcctgcctcagcctcccaacatgctgggattacaagtgtaagttactgcaccaggtcgggaggcttttttaaaatggtaaaacaacaatgcatttgtatgatgatgtaaatgatcaggtagagaacaagcaattgatgatgccagagagggaggctaacttcaagagtgatgttcattaatattaagaaggaaataaaagatgagaatccatacacaagtgaagttggacttcactattctccacataacagcaattctttgaatgtacaacaatcatttccttctcttctcttcacactgtcttttttgtttttgtttttgtttttttgagacggagtcttgctcttgttgtccaggctggagtacaatggcatgatctcggctcaccgcaacttccgtctcctgggttcaagcgattctcctgcctcaacctcctgagtagctgagattacaggcgcccaccaccatgcccagctaatttttgtatttttagtagagacggggtttcaccatgttggccaggctggcctcgcactcctgacctcgtaatccacctgcctccgcctcccaaagtgttgggatttcagccgtgagccattgcacccggcctcacactctggcttcttaacacatttaaaatgaaatccaggctgggtgcagtggctcacacctgtaatcccagcactttgggaggccgaggcaggcggatcacctgtagttgggagttggaggccagcctgaccaacatggagaaaccccgtctatactaaaaatacaaaattagccaggcgtggtggcacatgcctataatcccatctactcaggaggctgaggcaggagaatcactggaacctgagaggcggaggctgcggtgagccgagatagtgccattgccctccagccagggcaacaagaacaaaactctctctctcaaaataaataaataaataaaaataaaatgaaatccaaaatcctgactgtggcctgataatgggtctgacctctggctactcctgacttcactacctaccactttttttctcatcaggaaataataagagtgaaggcagagaatatggcagcttgctggttaagggagttctgtctgattgatgctattttcttaaagtagaaagtaggtcatgagctaatgcaaggtgtaggggcattagaagtttgaggaaagagggatacgtgtgaaatggtcattttggatcctgagaaaacaaatattccagggatgcaaaggattgctgggcaaccttgaggatacatttgaagtttgtggtcttaactttaaagtgaaatcacttttaatttctgtgtttccttcagcaatgtttcctgctttaagtggagtacagaatatgtggacagctaggttcagcaagggtgggccttgccatgtcaacgcgactgagaagcttggacttcatattgagggccctagagagctactgaaggtttgagtaaagaagatttaggtgttagaaagatcattctagctcagtatggtgtgtgtgtgtgtatgagagaaaggcttattataggtagaacagtagtttaatacaataggagcctttatcaaacacctgcataaatttgttatagcttagatgacagttcaggaacatagagaggtctatttccagcattttctgagtacctactatataccagattctgtaaagacaaaataaacaagggtttgcctatccaaagctcttgtagaagatttgtaattattattaggtatttgggggacaaagaagagggaaggagcaattaacactgggtgaaaatccaggaagactcccagaggaggtgacatttcagatgagctttgaaggactaggcccttagggagggaagataattctgaaaaggaagaatgagcccagtcaagagatgcgaaatgtatgattaaaacattttatgtttatgatttgctacggccaggcacagtggctcacacctgtaatcccagcactttgggaggctgaagcagacggatcccttgaggctaggagtttgaccatcctggccaacgtgttgaaaccccatttctactaaaaatacaaaaaattagccaggtgtggtggtgcatgcctgtagtcccagctacttgggaggctgaggcatgagaatcgctggaagcagggaggtggaggttgcagtgagctgagatgcgccactgcactccagccagagcaacagagcaagagactgtcaaacaaacaaacaaacaaacaaataaataaataaattgctgcatgatgagaaatggtggaagaagatgaggttcttcttccattaaccagcaactaaatagaactaaggagtttttcctctagaattcacgacaagggtaaggcatctgggctcttaacagcagcaagaaggatttgaaagaaaagaagatggttttaaaatggtgattttaatttaaagaaaaataactacatggtgctactctgggcatctttgctataatttgctcacttaggaacaatgtgaagttaaaatgccttatctagcctgttttggaatgccgttagaaaatattaattataatcactctgagctgtctatacaagatgcttttaatggcaagcctcttcaaatcaatccttattacttgcttttagtacattatttcaagttaaatgatccttctgtgtcctaagtcatgcttttgaaataaggtgtattttcaatatatttctaagaatgaggagtttatgaccctggttcatgggtcattcggtagactaaatgagataaaggcatataaaattattaatacagaacttggcttgggagccaggagtaaatgttttttgttctcccttagacccagtcttttcatgtttttccttctttcctccttaaatcacattgtttcctcaacacccacgtactagatccattctctgttctagggactccagaatcaggtgaaacactcatgtcaataatcaaacactcatgtcaataatcaccttacaggggaagtgtcaagttagtgtgtgtagtgtgtgtgtgtgcccatttagagggtgaagaagctaaatcaagcctctgagtttcaccttggaagggcctggcaggacctggcagtggttgcctgtttgtttagagggagtgtggcttctgctggctgttaggagcccgcaacgctctcagctgagagtgcttcaatctggcattatccaaagaagtgggaaagacattccttccttccttccttcattcagttattatgtatttattcagcaaatattcatagcctgctagtgcacagtgctgaataagaacatgagtaagagcagggaagcatgagagagcatggctcaccttagtagctgcaggtggctgggtgcagctggagttaaaagacactctgagtttttcttaaaaaaaacaataaataccaaacttagaatctaataaggaagaggtgctctcaggggaagttaggtgtgttcctaagaatttgtcatttcttttcaggattagtcaggatgaactagacatttcttttcaaaagcctaataacttcctttagggaactgccaaactgactaatccatgaccttaaggcagtgggtcccaaactttgctgccaactcaatcacctttggagttttttttttttttttaaacgcagaggcccaggtcacactccacaccaatgacatcagaatgtctaggggtgggagccaggcaccaggattctaaagaccctcacgtgatgacaacagctagcaaagttctgtagctactgccttagggcatagtctaatttcttcagtaaaaacacacttattccaaatttggttccagaattgccttaaattgtttttgctctgttcttaggttgggggcggctatgagcaggcagaggatgtggtgtcacccaattaggagctctcagcttacgaggcaattagcataggttgccagggctgcacgaggagtggatttctgctttgtcattctgactctggcagttagcccgcccgctcggcgcagggcgtggcttctcgtagccattaggaaacagcaaccctttcacctcagttttcttcactccggcatttgcagcagagcgaaaggtggtcgagtcctgaaggagggcctgatgtcttcatcattctcaaattcttgtaagctctgcgtcgggtgaaaccagacaaagccgcgagcccagggatgggagcacgcgggggacggcctgccggcggggacgacagcattgcgcctgggtgcagcagtgtgcgtctcggggaagggaagatattttaaggcgtgtctgagcagacggggaggcttttccaaacccaggcagcttcgtggcgtgtgcggtttcgacccggtcacacaaagcttcagcatgtcatgtggtaggtgaggccggcgcctgtaggctggcggtttccttcctcttggtctttgtagagacagtttgcagaacagcggagaaaatgggtattgtatcgtttcttacagagtccgagtcttgaaatgtagatgacaatgtgttgagtggactgacagatccttgagaatattaagaaagtataactatgtaagaatgcttctctaggaattttcacaccatttaatcctcagaaatcctgagacgttggcaaaacacatggggtctccatgtttttacaagtagggaaagcaaggctcagaaagatcaagtggcgtgcccagctggacacagactattaaatggggcggcgacgacgaccccagggcttcctcactctctcaggcagtacaggacagtgattaaacgcgtcgaccacattgcctgggtttgaatcctgccgctgcttttgagtagctccttgagcttggacaagtttcttagcttttctgtacctgtttccctgtctgtaagttgggcctggtaatacttacttgtagagtggttgtgaagttgaaatgtaaatatatgtgaagcagtatagacatgttagctactattattacaattaagcagctatactttgttttttgttttttgttggttttttttgtttgtttgttttttgagacggagtctcattctgtcgcccaggctggagtgcagtggcacgatctgggctcactgcaaccttcgccccctgggttcaagcgattctcctgcctcagcctcctgagtagctgggattacaggcacctgccaccgcgcccgactaatttttgtatttttagtagagacagggtttcaccatcttggccaggctggtcttgaactcctgacctcatgatccacccgcctcggcctcccaaataagcagctatacttttgaatgttggcgtgatttatgtctaatgaataggcctcatgtcagtgtaactgtggaatctgtatgttccactgagttcacccctttgtgaaattttaccattagtgcctagtttcatctgtagcgttgtgtattgcttcaggattctttttaagaatgcaccaggtaggcagagtgttcttaattttgctccacggtttcaaatgtcaaggaaacgttggaagttggattttggcattcagtatagatgcagagttgaaagcaagatcaaactgggaggtgttttgtgaaagttgagataaacgtgtattaagcttcttttttgaagcttttctgaattcgggatttaccgggaaagtaggacgtttaattttagcggagtagtgcaatgatttaaccctgactagaactctgacgtttacagctagccttgaggccatgttttcagccagtgtgcggatttgccggggtcagactccaagcttgattgtgagttctagcctttgtcagaaatgcagcaagtcatgctaacttgcaagggagtcaacagagggcacgcggtgcctgcggggccgggacggaagccccgcccccggcgcagttcccgcctgttagcgggggagaagcaccttacacgctccgctctgcttttgtgccacacagaggacggtcgggccctggaaggaacgctctcggaattggccgcggaaaccgatctgcccgttgtgtttgtgaaacagagaaagataggcggccatggtccaaccttgaaggtaggagagagtaacgtatctttttaaacgggggatgagctcgttgagctcagcgtggtcacagcctgccttttaaagccagcgtggatgtgaccctccaaacgggacgcagcgctgggaaatgacgaaaaacgctcgtgggctagcgcatgtgttaatcgaagttgatgagacgttggacaaatttcacatctcgggaaacttgaaatttctaacgctttttatcttttaaaatagctttttaaaaatgtcctttttctcctatttccccttcctctttccctcccagttgtaaataacattttttagcagcaatgtaatctgctaaatgttagttgtttagggaagtcctgagaaaaggggatcaggaaatgcttatctttgtcatcaaggtggccctgtaatcttcctcttaattctctcaggggtaggggacccggaaaccccagggtctggaggagagcaaccaggaagctcttggggtgacttcgttttccttcaggtgtgtctttttagcccagagttaatagttgggtgaagggaaaggaagaagtcttccctttggctggtagcaaacgcagtagaaatccttccttagacctatgctactgaggagttatagccactgagggatttatagcctacagtgttagaaaaatgcttggaggctgggtgtatgtatgttttatttatgtatttaaaaaaaaaaaacagtcttgctctgtcacccagagtgcactggagtgcagtggcgtgatcttgtatcactgcaacctccacctcctgggttcaagcaattctcctgcctcagcctcccgagtagctgagattacaggtgcccgccactacacccagcttcaccatgctggccaggctggtctcaaactcctgacctcagatgatccacggctgggtgcatgtttaagggaacaggacacctgggtgatgttctatctcacctgtggtagattaccaggttagaaaacttcccgtagtcccatcaccacgatccatgtgatttttgtccttatccatttatatctctgtaatttttaagaaatgaaaacattgccttcttagaagtaaacctaacgcctgcgttaaatgtaaaaatatatttagatgtgttgcagccttaggaaaaatactaataatttgaatttttatttattaccttttcttttaaaagtattttatttatttttgacaaatggttatagggaatggatctagacttcaaacagcaaattaatggaaaattaatggaaatacagaggcttttagctttagttaaaatatattgtgttactcagacctttagtttgcaggtaaaaagagataacggtctattatattaatattccttcctggccgggtgcggtggctcacacttgtaatcccagcaccttgggaggccgaggcaggcggattgctttgagctcaggagttccagatcagcctgggcaacacggtgaaaccccgtctctactagaaataaaaaaattagccagggcttggtggcacatgcctctggtcccagctactctgggactgaggctgaggctggggaatcaacttgaacctggaggtggaggttgcaatgagctgagattgcgccactgcaccctggcctaggtgacagtgagaccctgtctcaaaaaaaaaaaaaaagaaatatacatatatatatatatatatatatatatatatatatatatgtatatttcttcctgtctgattattctattattttcacctgtgccataagtttacatttacaaagttatatagtaatttgatctttatgtaattctactgatactcctggttttaatggcaatgggagtaaaaagagtcactctttttataagctttggaactcacttaattgatttggtctgatgttctgatgttttttctttttttttaattgaaaacttttttttctttagagatggaggtctcattatgttgtccaggctggtcttgaactcctgggctcaagcgatcatccggcctcggcctcctaaagtgctgggactgcaggtcacgacatttagtgaggtatagtgccatgaatgaaaagcataccatcaagaacacttaaaagaaatcatttagcatatttcttaagtaaacttattctactttgtgtcttttttttttttttttttttttgagacaaagtctcgctctgttgctcaggctggagtgcagtggcatgatcttggcttaccgcaacctctacctcccaggttcaagcgattttcctgcctcagcctcccgagtagctgggattacaggcacacgccaccacaccctgctaatttttgtatttttagtagagatggggtttcaccatgttggtcaggctggtctcgaactcctgaccttgtagtccaaagcgctgggattacaagtgtgacccaccgcacccagctttttttttttttttttttttgagaaggagtctcactctgttgcccaggctggagttcagtggcgcgatcttggctcactgcaacctctgcccctcgggttcaagtgattctcctgcctcagcctcccgagtagctgggattacaggcgcctgccaccgtgcctagctaatttttgtatttttagtagagacaaggtttcaccatcttggccaggctggtcttgaacttttgacgccgtgatccacccacttcggccttccaaagtgctgggattatgggcgtgagccaccgggcccagccctatttttgttttttaatgagtgctaaaaaatgaaaggagaaacagcaaggtaaggactattggtttgaaagatctgtgaacttttcagccaattattgcccacatttggggctaaatggtaggttttgaaacccttaagggagctttgggtttcagtggagaaaggcatttatttagtggagaattgagtgcttatagtcctaaaggccacacctttaaaaagaaggttaagatttcatactttaattgcaacataaataatggagggagctcttcaaaatgtccacttttcctttctccttttaatattgtttcttcctcatccccttttccctgaataaacaacagcagcaaaacctaccctgctttcacagtgagtgtactatagaagacaagggagaaagaatcctgctggaagaagttggtgagcctaggtgactcccttgataaaggatgaaagctttgcagaagagtgttccaaaaaagtgtagtctccagaccacctgctcagaatcccctggagtactcgttaattatgcatgcccaggctttacccgagttcttttgaagtagactcgggaaagagctaggaatctacccccgcccccccgccttttttttttgagatggagttctgctcttgttgcctgggctggagtgcagtggcatgaactcagctcactgcaacctccacctcctgggttcaagtggtgtggttctcctgcctcagcctctcaagtagctgggattataggcatgcaccaccatgcctggctaattttgtatttttttagtagagatgtggttttgccatgttggtcgggctggtctcgatctcctgaccacaggtgatccacccacctcggcctcccaaagtgctgggattacagtgtgagccaccacgcccggcttgccttattgtttttgttttgttttaaataagctccctccaataatttttaggataaatgtcaagtttgagacgctttaatattattgtacatagggtagtttgatcaagatcatttgatgagataattagaattgcggaaaacaaaggactagtctttaatacccaaaacatatttgttagaaaacagcaaataggaacccaatgggggaggaacactttttgttgaacactttaacaatgaatagaaaaatagggaaccaagctgtttgcagccagggcttttgtatgtccatgtataaagttggaactagggacctccaagatggttaagaactatgaatagagttcctactgctcaaagatgtggctttcataaacatcttggtttttaaagcaaagttccagtattcttatagggaacctcttttgtatgtaaatcagcatctccctcaggattccagggttttgaaatcacttgtagagaggcctattggtggtactgagaggagaagcagagtgagtgaaaaagtatttactggaataataccaagtgtcagacatagttaagactttagtagtttgaggtaatcctgggagataagactaaaactgacaactcagggcttaaataatttcttcagggcaatattaggagagatgacaggcaccaagcaatgcgggattaatatccaggtgaattttgcagacagttgcggtggccccatgttccagtcttggggggtagatgctgagacaaaggcaggtctccttttatgttttgagacaaggtctggctctattgcccagtgcagtggcttgatattggctcattgcaaccttcgcctcctgggcttaacccatcctcccacctcagcctcccgaatagctggaactacaagcgcacaccacctcacccagcttatttttgtattttttgtatattgggggtttcaccatgttgtccagtgtagggaccagccccacagggtcggtgggtctctccctgtgtgcggcgacgagagagtgtagaaataaagacacaagacaaagagataagagaaaaggcagctgggcccgggggaccgctaccaccaatgcgcggagaccggtagtggccccgaatgtcgggctgcactattatttattggatacaaggcagaaggggcagggtaaagaatgtgagtcacctccaatgataggtaaggtcacgtgggtcatgtgtccactggacagggggcccttccctgcctggcagccgaggcagagagggagaggagacaaagagaaagacagcttacgccattatttctacacatcagggactattagtattttcactaatttactactgctgtctggaaggcagagccaggtgtacaggatggaacatgaaggcggactaggagtgtgaccactgaagcacagcatcacagggagacggttaggcctccggataactgcgggcgagcctgactgatgtcaggccctccacaagaggtggaggagcagagtcttctctaaactcccccggggaaaggcccccccccccgccgccggctttcccggtctgctaagtagcgggtgttgtttcttgacaccttttgctactgctggaccacgatcctcttggtgacgggcgtcttcccagatgctggcatcaccgctagaccaaggagccctccggtggccctgttcgggcataacagaaggctcgcactcttgtcttctggtcacttctcactatgtcccctcagctcctatctctgtatggcctggtttttcctaggctatgattattgagtgaggattatcataatattggaataagaagtaattgctaccaactaatgattaatgatactcatatataatcacatctaagatctatatctggtataacaattcttgttttatattatactggaacagctcgtgtcctctgtctcttgcctcggtgcctgggtggcttgccacccacagtccaggctggtctcaaaactcgtgagtttaagccatctgcctaccttggcctcccaaagtgctgagattacaggtgtgagccactgcacccagccaggtctcctttcaagtctaacttctaaagttaccagaaaccagaatcttaagtgaatagacatcaggacatgagtggtaattgaataactctccaaccatcccctttcttaactattcttaactgcagaggctaccagaacttgacagaaaacacaatttattttgtttctatcctcttaaataatcccttctttttggaggcattagtaatgtatctgcttttggcttgattaaagttgaggcctgaggaggactggaggattgctttgaagatgagggaagtgacagattctctggcgtacattaaaaggaagtaagggttgaggactaccaagatttattagagtcttagactgttagaactgcaaataaacgtagaaatttactggttgtagagtcgtgttgagctcctcctacttctaccaggtgtaaacacaaatctctttttttgctgtgtatctgttctttaatagtagcgtcaaaattctggtggtatagacttcagatttccggtcacttctcctgtttactcaccagcgcctgactattctaggcatcaccttcttgcccctatttacttttgcctggaccatttcatcagtctttaactggcctcccacttctgatctcccttctcttccagctcatattgccagtcatcttcctgattgctactcgctggccccagatctgcatccagaacgaaatgggagctccttagcttggtattcaatgccctccagggtctagccccaacctgcttttctggttatctcctgctctgctccctcacttactggaggctcccgggactatcattgcagctaaaatatttctccctacagttttcctcctcacttctattctttatttcaacacctgtcttctcttcctaccacaacccacttttccaactgcctacccgttcagaatacaagaccaaagttttccattcctttcctcctctgttcccacgacaatcccataagtctttatttttggaaaaggaggaatcctgccaatgataactttttggcttacatatcgaggtcagagagctagtcttattctttatgcctgtggtcccaggcatatgttagagcccagcagatacctaagcaaatatgcctgttaatgattataacatttatttgttgaatacctattatgtgttagactctaaatgttgttaatacttagtgattaaatccccacaacagtcctgtgaaggaggtgatattatccaggtttacagaagagaaaataaaagccttgagaatttaaggagcatgcccagattacaagctagttaagtggcagagtcaggactagaacccaggcctgtttgcctgcaaagctcactctcatgtactcatacttctggcacttggccttatgttattgctattgagatacatgcttgtgtccttgatgagatgctgtggtgtgctcatgattcgaggtcaggcccatgcaaatcttggtattcctagcatagtgctggcatatggtaggtgttcattcattacatgcttgctgaatggaacttcattcttctgtgcctacttgtactttctttaagagaacaatgaggctgggcttctaaaaaaaaatatacattttaatatcttccatatattgaaaaaaatttctttagaggcaaggtcttgctctaacccaggctggagtgcggtggcactatcatggctcgctgcagcctcaacccccctgggctcaagcaatcctcttgcctcagccgcctgagtatctgggaatacaggcatgtaccaccacacctggccaatttttaaattttttgtaagataaggtctttacaaaaggctttttgttggcttaggcttattttttaatacctagtgtgcattcagtaaatatgtattgagtgaatagatcgtggtagggccagaagagactcacttaaaggatttagctctaaggtatctggttttattgaagatgggctatcaggaaccaagctctaggttgttcagaagagattctaggcagcatattggaaagcagttcagaattaaaagctgtatgacagcaacattgtctgccttcagcattctatgcaggtgtgtccaggtcagttgggaacaaagtcacttcacatctatttagctagtatttactgagcacctgtgttgacatcgggctaggcactatctttgtaatctctaacgcaagtctgtagagcaatgtacttatttaaaaattcatttgtcaggctgggtgtggtggctcatgcctgtaatcccagcactttgagaggccgaggcgggtggatcacttgaggtcaggagtttgagactgacctggccaacatggtgaaaccccttccctactaaaaatacaaaaaattagccgggtgtgttggcgggcgcctgtaatcccagctactcaggaggctgaggcaggagaatcgcttgaacctgggaggtggaggttgcggtgagcggagatcctgccattgcactccagcctgggcaacaagagtgaaactccatctcaaaaaaaaaaaaaaaaagtaatatacaaacacttgttgacaaataaatttatatttatttatttatttatttagtttttgaaatggagtcttgctctgttgcccaggctggagtgcactgtgtgatctcagttcactgcaatctccgcctcctgagttcaagcaattctcctgcctcagtctcccgagtagctgggattgcaggcatgcgccaccacgtctggctaattttgtatttttagtagagacaagatttctctatgttggtcaggctggtctcgaactcctgacctcaggtgatccgcctgcgtcagcctccaaaagtgctgagattacaggtgtaagctaccatgcccggcctgattttgtttttaatgatgacaaccactctgtatggcagagtgagacatctgatagacttctgttacaattttcgaagaaagtaagtggaaactaataatgcagatatttttcatttgatccctgagtggagttcctagaatgctgcatcctttagtagccacatacccagtccttcttaccctccctgtctatcaaaataacactcctagtcattgctgccttttgaggtgttgtggaggctctcgtaacctgaaaggttgttcttttcatctcacgcccttatttatattcttgaggcttggcaagtcagccagcactgggtttttaaagtgtcattaagtatatgatttgaccacagagcaagggtggagattttatctactccaaagtatttcaaatgagtgagtccagattatttagtgagactcttttacttctccaataataatgccatcttatttgaataaagcagttattcaaagcctcttttagatactagacttaagaatctgctgaaatctaaggagctattcctgagaaaaatgcacataaataattttgcatataaactcagactatttgtggatctgcttcagaatatctggtacagagaattacccttcaaagtgttactgtacacactttgaatagttgaagccttcgtaggtttttaaaattttgttatatggcaaatttcttttcactggtatttgttatagtggaatatattcctgtgttcctccttactgatttaacctttaaaaatatttttctggggccgggcgcagtggctcacacctgtaatcccagcactttgggaggctgaggcaggtggatcacgagatgaggagtttgagactagcctggccaacatggagaaaccccatctctactaaaaatacaaaacttagctgggcgcggtggcacacacgtgtaatcccagctactcgggaggctgagtcaggagaatcacttgaacccgggaggcggaggttgtagtgagctgagatcacaccattgcactctagcttgggcaaccaagcgagactctatctaaaataaaaataaaaaataaaaaaaattaaatttttttctgttcctaaagcaacattcagaagtgaaactactggtttgtatacagtttttttttttacatttgctatctttgggattgtttgatttattaagtacctactcagtagttgaaaacactgtcagatatattacataattttcattcactgtagtaattatatggtataaatacagttgtccctcggtatcttcaggggattggttccaggacccttgtgtatacccaaattcatacatactcaagtcccaaagtccaccctgtggaaccagcatatatggaaagtcagctctctgtattcaccggatgtgaaacatcacatctcacaaatacagtatttatttctttatttctcacaagctttttcctctttaaggagcaggcagacctgtattttttattgcttttggtataagtggatctgtgcaattcaaagctgtttccttcaagggtcaactgcagtagtattcccgtcttataaataaagacactggaggctgagaggttaagcaagctggctaagataatactaataggtaataggtcaagattggaacccagatcgtcccctcccacagtctgtggtcttttcagaaactaattttcattaaaaaaaaaaatacagatatctgtcttatcatagcaaagttcacctttaataataacaaaacacaaaatatatacacacaaacataactttaaagaaaattacgatgaaagagaaactgccaggcacagtggctcacgcatgtaatcccagcattttgggaggctgaggcgggcggatcacgaggtcaggagttcgagaccagcctggtcaacatgctgaaaccctgtctctactaagaatacaaaaattagccaggcgtggtgactcgtgcctgtaatcccagctactcgggaggctgaggcaggagaatcacttgagtccggggggtgtaggttgcagtgagccgagatcgtgccattgcactccagcctgggtgacaagaacaagactccgtctcaaaaaaaaaaaaaaaaaagttaagatgaaagagaaactatacctaatgtcctgctaattctggcaaatcaaactaggaattttaccacatttcttcacaactcaatattaaacagaagccatggtggtatgaagggagaaaagctgctatgaaagaaggaacagaaaagtttagggaggtagctattaggataagtgtatatgttagagtgtgggactcaaacctgactgattcctggctttggctccaaaaagtctcttaaaaatccatttgttataggtaagtgttaacagcaaaacctcactggagaaaaatagtggactcgtgacttcttcctttatttggttacagggagacatgtgacctttgtcatccaccctatcacgtttgtgttgagcagtatgggttgtgggaaagagctcaagaatgcttggaattaacctaaactcctagaaaaggaactgaaaatataggagaaaagggtgaagaaaagaggaaaggaaatggaggtctgtattgaaccctgggtagcaactcttgagcgaagaaagaggaaaaaggggaaagaggggagctaaattatctctgaggcaactcagtctcatggttgcctgaactagtctatactgcgggaataaggtagacgccactggtttctttgaagtaccagtgcgcttcttgctttctattcctggtcacagacaaatttatcagtagtgcagtttcttctttttaagcttcatttaaataattattagtagcacttggaccttaggttaggaaatcactgtttaatgacttaaagattaaccggcatggaaatcccattctttatatgattggggagagttattgaacttgagattgttttactttgtagcaatgtctaaaggcagatttgttttgttttgttttgtttttgaggcggggtttcgctcttgttgcccaggctggagtgcaatggtgcaatcttgtctcacccgcaacctctgcctcccaggttgaagtagcagggattacaggcatgtgccaccacgcccagctaattttctatttttagtagagacgtggtttctccatattgatcaggctggtctcaaactcctgacctcaggtgagccacccacctcggcctcccaaagtgctgggattacaggtgtcagccaccgcacctggcctaaaggcagatttttaaaggtggaacataatgcaagtctgcctttcttaggatgatctaagttacatgttaataaagttcttggagatctagcatagaatgcattcagcactgtaaatcacaacttaatgtttgcctcgatatgctctgttgctctgagcaagttgtgtgggctgttatctcctgagaaatccctgtaaatggtattagtaatactttataagcaggttgggagaatatagttttctaaggcattttgaaattcttagatgaaagggtctttatgtagcaaattggtgtcagcctattttccttcctctgagccagaagaaaataggcaccatagggtgggaagggttggcttatctgttagagttcttttgtaagtagcttttgttgaattttttttttgagatggagtctcgctctgtcgcccaggctggagtgcagtggcgcgatcttggctcactgcaagctccgtctcctgggttcaggctagtctcctgcctcagcctccagagtagctgggactacaggcgcctgcaaccacgcccggctaattttttgtatttttagtagagacggggtttcaccgtgttagccaggacggtcttgatctcctgacctcgtgatccgcccgcctcagcctcccaaagtgctgggattacaggcgtgagccaccgtgcccggctgcttttgttgaatttaaagtggatgtgagaagctcctaagaatatcgttcactgtaaaagcagacttttttggatttgggtcttggaattcttaactgtattttcacctaagatttaaaacaagttcaaatactagtttgtaattggccagactagggacagatacgatccttgaatgatcctgggtctcaacttacctttctttcatttttcctttattttagaagagggataagaactttttctgaagagcagtcaacttttcctttcagtgtgtaggattaattccacgaatctgtgaacttaaatctttgctgccaaataacttgcagtagatgctgggatagttttaaatctattttaagttatacattcagtacataagtgcatctccgtgtaaaaacagctatgtttggaagatctaaaacgcagcttttgtttttgagaagccaacaatctaatagggtaggatcatatatatgtacaactaaccgtaatgcatggtgttttgaaaaatgcacgtatctccctgaattacccctagttaataaaataattgggagcaaatggtaatataaggattttggagtaacttaatactactagattttgctgtttatacatttacaaaaaactttctgctaatgctaaagaaatagaacaagtctatatgcataaaggaaggtagggctaatttacttcctggtgctatgaaactggcaattggacaggtgcaattgtgggtgtctttttttttttaaggtgtacctgttgcaggtttgaaaagctgttgatgctcatgggttgtttgtgtgcatgttctctttaaaaaccagatgtattcattccctttttttttttttttttttttgagacggagtctcgctctatagcccaggctggagtgcagtggcccgatctcggctcactgcaaactccgcctcctgggttcacgccattcttctgcctcagcctaccgagtagctgggactataggcgcctgccaccgcgcccggctaattttttgtagttttagtagagacggggtttcaccgggttagccaagatggtctcgatctcctgacctcgtgatccgcccgcctcggcctcccaaagtgctgggattgcaggcgtgagccaccgcgcccggccattcccattgttatgtatactttgctatttgctgctggtgagacagataaggagtcacgtctttaactgcacttgagtttccagtgaccccattaaatccaatgggtaaattttcccacgcagattactcacccagtttacagattaagctttcatatccttagactgtatctgaaattttcatagctttgcccaccttttagggttcagagttactacccattcagtgtcggtggcctttagctgttggcaagcttccaagtaaatagctcttttgcagagatctctacccattctattcttccactcctgggtagtggagaaccaaagttcacctgagtaatgcccgtgcccagcacccagtttcctgcaggggttagcacggatattggaggctcccccgatcccacagatactcaggatgggtattggagggggcttggtttttaagaggacatgtgaaagtaattaacccgatttacatttgtataatgagtccaaacaccaccttgcaaaagaactgagagtttagcctgcttaatggagtttctgcttttcacggtccttggccttaccgacggtttacagtccagccagatttagttcacaaaaaaccaaaaccaggtcgacctcactgcagtatatgatggcagcgagcgttttaaagcgcaggacctttagtctcctcaatagttttgtgtaaagttgtccaaaagtgtttttttttaaagtgaggtgatccagtcggtaaacgctttgaaaaagaatagctgtcccctgagcgggcattagtcgcgtgtgaggtcagggcccatcattgcgcgtgttgggagcgccgcgctggtctatgagcgagcgcctcggcttgtggctgggccgggccggggcggggctgtcttcccgcggagcgtgctgggggcgggtcgcgccgggccgggccgctagtgcgcatgggcgggcgtcctcggctctaactgccgccactttccacacgctgggagggccgttacctcagagatacccgtggccggcatgttggttgaaaaagcttcccggaagggagacgaagagaaaggagaggagcagctcgtgatcatccccggtagcgagtacgcggcgaagtaggcggcggcggagggagcgctgatgaagatggatgtgtcagtgagggccgcgggctgctccgacgacctcagctctggggaggccgacgtagacccaaagctcctggagctcaccgctgacgaggagaagtgccgcagcatccgcaggcagtaccggcagctcatgtactgcgtgcggcagaaccgggaggacatcgtgagctcggcgaacaactccttaaccgaggctctggaggaagccaacgtcctctttgatggcgtgagccgaaccagagaagcagccctcgacgcccggtttcttgttatggcttctgatttgggtaaagaaaaggcaaagcagttaaactcagatatgaacttctttaatcagttagcattttgtgactttctgtttctgttcgtgggtctgaattggatggaaggcgatcctgacaagttgagtgattgtgatgatagcatagctctttccttctggaaggcaatagaaaaggaagcaacatcctggatggtaaaagctgagacattccattttgtttttggttcattcaagctagaacgttctgcaccaaagccccgacttgaacaccagaaaaaagttcgcaagatggaagaaaatggcaacatgcctacaaagttgcagaagttggacctgagtagttatccagaagcgacagaaaaaaacgtagaaaggattttgggattgttgcaaacctactttcgaaagtatcctgatactcctgtgtcctattttgagtttgtgattgatccaaactctttttctcgtactgtggagaatatattttatgtttcttttattgtaagagatggttttgcaagaataaggcttgatgaagacaggctgccaatattagagccgatgaatgttaaccaaatgggtgagggaaatgattccagttgccatggcaggaaacagggagttatatctttgactttacaggagtggaaaaacattgtggcagcttttgaaatttctgaggctatgattacatactcctcatactaaagatttcttagtatagcatcctttttgtgttttttttctgaagttagatggagagtaaaatgtaaactgaagcacatattgtatctcttgtaaagtgaaaaagtattttcaagaacatcagacattgttttactgtgcagcatatttttcttagtaatttataaggtcatgatcttctgttattaaaacaaattcactggcatatttatgggaacgttttattgaatgccctttaagactattaataaaaacaagttttggataccaaattaagggatatttgataatttgcaaaacataataatttacgaaaatcagtgatgatgctctgtgatgcgttgctttctctgtcatagggaaccaagagaatcccagaaagggttcctaaccaggttgggcaaagagtgggtaaaaaacaaaagttaaaaaaaaaaacctgtctgtaaggcagtgaatatgcaacattaagactaaaaaagtcattgcaaggaagacttaggatttatgagtgagtatccatattctaaacaatttctgttattgtactcagcaaaagtagtgtctctgctgtagtagttgaggtatcagctaagggtgaaaggtgagtagaaacacgaagaaggaaaaggcattctaggcaagagaatagcaaggtcaaatgcatggaattgttagaagttaggcacgagaggaccattagatttatggaaaaactattatatttgataagctgggcaacaattgaataacttcatctattaatatcctgagaagatgtttttgtcaaactattatacattgaacacaagatcttgctatccagttgtagtttttatctactgaatttcttctctggcccctagtgtccctttgtggtctttgctagtacatagaatgtccttcacaatctacgctttttcatcatgtaacaactttgaatatttgtcccactttaattttgcatttctatctttttttttccccctcgagacagagtatcactcttgcccaggctggggtgcagtggtgcaatctcggcccactgcaacctctgcctgcggggttcaggcgattcttgtgcctcagcctcccaagtagccgggattacaggtgtgtgccatcacacccagcaaatacttgtatttttagtaggaacagagtttcgccatggtagccaggctggtctcgaacacctggccccaagtgatccacccgcctcggcctccggaaatgctgggattacaagtgtgagccaaattttgcatttcttaatagggctttaaatgccaggaaactgaccttgctgaaactaaaacatgttagtttatctggatgttcttcacttagtgtaaagccataaaggcttttttctttccgttgcataaattacaaccttatttggagattattgccaaaagtttgggtcattaagaaagtaacttgagaaggtgcagtaagcatacccataagctttcttccccttgatccctataggagcttaatttttggtagtcgtggaattttgccattaaacaatactttggcaaatgtttaggtatctgttatgcatagcagtggcaaactttcctagtaagtctagtggtacaggaaagggaaatccaaagactcaacaaatgacaccaagactgagaggaaggatttttcatgtatggagatgaggttcttcaccaataatagagtagaggttttagcaaaaatagaactttctcatgaaacttggcaaattattttctaaattagttactcctttcacatatgaaagagcgctgacccttgctagtgtctagtatcctttgatttatagtagcagtcatggaagcaccatttgatctcactcatcctcatttccagcatgtctctaccaaccaagttccttgggttttgcagagatctgctgttggaagaaaaagtactcttaatgacagcaaaaagatcccgccccagtactttactgacattcagttgctctgttgaatgtctcatgtctttactaggagtatttgacagtgatgatttaaaagcattaatagagaatctggaggcttaggagaggtaatttttttggtcttctctaaagttaatagctgttaaaatataaagttgaccacttctgtttctatttttactggttggcatgacaccaaccagtaaaatgatgaggatgatggattgcctcatcatttttgaaattttgaaattaaactgactgcttaccttgaagaaaaaaggagattaaaaatttatagaggttaagaatcaaactgcaaatctgcttgtttcttgctaatacgtttgtatactgaatagaaataacattatgctagtctgtctatatactggatcaagatttgttaggaagagggcatttcaaaatagtggagattgacgcagggaagctcagcggaggacaccagtgtaaatacattccagcacttcttgacttagttccaggcaatttcccttcttcaggagatggagaattagtaacttaaagggattaattcctaccagccactatgctaacatgcattatctttcttaaactcagccatttgatgaggtcaggaacctgttagcttcgttaaggattaggtgattggtcgaagtcacctggccttgtgagtggtagagcaagtattttaacgcaggttatttctgcatcagagccatctataatggtaggggaaataaaagtacaaatctggcaaaggatagaaactatgtttaggggaaaagtcaggattgcttattccaattttaaaagactgccacagttgaattgctttctgttttgtgccctttttgggggagcctggagcagtgttttactaggagtgggtctggggaaagggattactatgacaggcaggtggatgaaaaggaaggctatctaatgtgtaagccttgccaacaagtgacagttgcctgcaggtcatctcatattctatagcattggttctcaaagtgtatgaggcccttttggcatactttaaggtcagaattattttcataatagtaagatgctgtttgcccttttctttcttttttttttttttgagatggagtctcactctgtagcccaggctggagtgcagtggcatgatcttggctcactgtgagctccgcctcccgggttcacgccattctcctgcctcagcctctcgagtagctgggactacaggcgcctgccaccacgcccagctaattttttatatttgtagtagagacggggtttcaccgtgttagccaggatggtctcgatctccagacctcatgatccacccgccttggcctctcaaagtgctgggattacaggcgtgagccaccacgcctcgctgcccttttcactcttaattctcttgcatgtaaactgtgaagttttccagaggttatatgacaggtgatgtggcaacagattgaatggagaaacagatatgagctgtcttttgttgtcagacattaaagagaatcgcaaagatacaaaacagtgccattcttctaattaaaaaattttttaaaataaaaatacgttaacatttaataaatatattatttttaatttgttaatgaatattttaagtttcttcttagttttaatttctaatatagtaaatagataaaacccacattaacaagctctttggagtctcaattttaaagctctgtttaagattgtaaaggagtcctgagatgaaagagtttgagaacctctgtagcagccaccacagtcagcggacataatttcaagcagttgtagttggaggaggatgggggaatttttctcctttccttatcccatctctgtgctaccttctactgtttggggcagctgttttctactgtctgtcttatttatatttcaggtgaagtaccacttaaatggaactgaatgatagcactttcaattttaagtttggttaaaattttaaaaacaatgtttctttttttttttttttttgagacggagtcttgctctgtcacccaggctggagtgcagtgccatgatcttggctcactgcaatctccgcctcctgggttcaagcagttctcctgcctcagcctcccgaatagctgggactacaggtgcacgcctccacgcccggctaattttttttgtattttggtagagacggggtttcaccgtgttgcccaggctgattgtgaactcctgagctcaggcagccctcccgcttcggcctcccaaagtgctgggattacaggcatgagccacctcactcagtctcataatgtttcattctaaggtcaactgaatgcttcaattgcctgtgtcttgccaattggtaaattttacctacagtgcttaaaaatggtgaggttcattcagagcttttttggtaaaatctgtgcactggttgatacaatttgacttgaagcttgaaccaggagaagccaggttacatacagaatttcagtaaggaacggattgtaaacattggtgaagggaatatgtgacttttcagcatgaggatacattttctggtatttgttctagtaggtatgttggaggagggggattcctagaaccatggttttcatttagacagccagttattgtgttctgtcaccatctttgctaatttcatgcagataaaatgaggttgagataaaaaatgattgtatgttatttttccagcagaacatctaactggatttattagttaactcttaaaccaggaagtcatgctctttgagacccagtagggagtcacactagttacttgaagcataattgatcctttgatcgaatggctattattaccaaattgtttttcccccacagtgctttgtattgaaggaggaaccttggccataatgccagttgatgactactggctgtgtttaccagcctcttgtgctagaccttttgtgcagactgtcagagtggtgcagtcttgcccccactgttgctggtttccaggtgttctcccttcagtccctgagccactacgtatgcccgccatgctgccaacaggtagccacagtgctgtgcttcctccttcacattgctccaccgcacccccttccacatcccaagaaccttcttcttccgctgaccccaagctctgcctttcaccccctacatctgatagtaggcaagagagaaatgtgcagtttgggctggtaagtttgggggcttttttttgttattaaagttaaggctttttgtttgtttgttttttaaaatgagatggagtctcactctgtgagactcccaggctggagtgcagtggcgcaatcttggctcactgcaacgtctgcctcccgggttcaagcgcttctcctgcctcagcctccggagtagctgagattacaggcacccgccactacacctggctaatttttgtatttttagtagagacagggttcaccccgttggccaggctgatctcaaactcctgacttcaagtgatcctcccgccttggcctcccgaagtgctgggattacaggcgtgagccactgtgcctggcctacttgattttttgaaaacattttattgtgcttgttaacaactttctcagtcattatctcttgttaacatagatttttattttagtaagcgataatattaaatatatcaccaaaatattgtatgaaacgaatatgaaatataattaatgtgtatcagaattatattagtggaatgaaatgattttttaaaaattaagtctaacacctaaattataaaagtctgttacttgctaagtatatggaaagtaaatattaaatatgggagacttcatgcatatgcaaattaaaggaatgagctttgcagagttgtgcctatttaaaatatcctacaaaagcagcaactttcacgtttaacttttcatgcaggtcagtatcaattgacagttttgttctgaatttttagatgttatgccccagccaaacagtatagaaatgtcttaaataaatatttggctggtcttttaaaattgttatattgagattaagctatgcccatatttaccaagcccctatctttaaaacctagtttaaaaattctaggaaaaaaaggctaatgattaaacctgatttagacctaagttggtttacttatgtagaggtactatacgaacacttcaaagtagttagcagtgaccgtctttggggttaataaactaagataaagcaagcagttcacaactttaaggaaggttgaatatttccatctgtatgctgtaattaaacagcatcttccctttgaaaattccttttgtttttctttaagaaaagattttcttacaaagctttttggacattgctgattttaagttaaattattttctcttctgttatttttctttaggcttatcaggagggcagacttcaaaagctactaaaaatgaacggccctgaagatcttcccaagtcctatgactatgaccttatcatcattggaggtggctcaggaggtctggcagctgctaaggcaaggctccttgtgttgtctgttgtctgttgtctgggtggtgattagaatattaacatccctgacagggttctctcctctctctgtggaatttatttgatccactcctgtgacattttgcacattaacttgggcaggacatggacatcgtaagggaccactttataaatcatttttccagattaaaatatacattccttatattaaagtatagggcccagtattttggaacacgtttccgttcactttaagtttaattgatttttcagagataataagggtgttgtgcctggtgtggtgactcacgcctgtaatcccagcactttgggagtccgaggtgggcggatcacctgaggtcaggagttcaagaccagcctggccaatgtggtgaaactccatctctactaaaaatacaaaaattagccaggcgtggtggtgggcacctgtaatcccagttacttgggaggctgaggcaggagaatggcttgaaccttggaggccgagtttgcagtgagctgagatcgcaccattgcactccagcctggtcaacaggagcaaaactctgtctttaaaaaatatatatatatatgtgtatatatatgtatatatacacacatatatatgggtattgtgtggaaatggtctgaaattaagcaaatatatttcttagttaatatttcttagttaatatttgtctttttcacttgaatgatttccctgttcataaccccttctctccaatataaaaaaagatggggagcaattgggtttcttaaacccatttattaaaaatgatttgctttttgtatatgtgaggttatctaataaccactaactctgtggtctgagggtgattgggaagaggatgtataaataaagaaggttaggagtgaggctcctggttctgaatcaagataaatttcccatgtgaggaccccttgggcctgtcatccttacccaacaggttcctttaaaagatgaagtggttataattccctaaggtatagcttgtgctgaatcagtaatgggtagaagctgcccaaatactgcagaccagtatgtagcatgaagcaatgctttactgaaagtaattgaggaataatacctgatgtattttactccagtggtggtgtgtttgaaagacgtgtagactcagtcctttcaaataacctttggaggtctagttgccaatattcaaagcttattctctgagaatgataaaagatattctgcaaaacaaacttctaactcttgtttccctccctaaaaatatatttggaaatatcatagatgttgtcaactttttcatgagcgcctcatgtgaaaattttaggaaatcttgtaatacagaagaaaaacttcttcagtattctgccttagaaaccaaattagattaaactttaaaatgatttttaaaatatcaccttataggatacaggttgcattaagggctgtagactatcagtaaacctgctttttcagctacttggcaacttgcttggaaatggccactttcttttttcaggttattgctgaatctgttattgtttgagtggaattatgtgagagaagtctaaggtttccagctgattctaacaattttactactctattctgcataattttaaaatctactctcagaactatctgaatatctgttaatttttatcctggagtttaactaatcatcatggtgtgtgaagtacccaggtattaattattcgttatgctttaagctctatagcttaaaaaaaaatcatggatttttaacagcccatttccaatctgtcatgttaacctttccaactcactttaataattttattttccaggaggcagcccaatatggcaagaaggtgatggtcctggactttgtcactcccacccctcttggaactagatggggtaagcttttaagatactctagaagtgatgttgccgaagtagttttcccctggcaataatctaactggttcctaaagcctaattaaaaaaatcaaaaactaagttaaagaaaaaacagccccaaaacatatatatcttttatttgagccaagttaaaatggatcaggttaaatgctaaaaatttaggttctttggcacagagtcaagaagtaagaaccctgtctacaagctatgatttaaaggtaaatatttgagtaatctagcatatataggggcttaataactgaaaatttaaacttttcatatgtggatttgttttaaatctacctcctacattcaacaagagttggaatcagataccctactgtatagcccttgctgcttctgagtcttgatgaattatatgttcataatatttactgaacatttattatgaaccaaggcaatgacgatatagcagtgaactcggcatattcaaagttcatgcccttgtgaagcttatattctaagtggggagacaaaagatacctaagaactttaggagttgtggtaagcggtattgaaaaaattaatatagtggcatagagaggaagtggataaaggagaatttaacttcgagaagattatcaaggaagacatctgaagaggtgacatttagaagaggccaaagaatgagaatgagccagctgtcaaaaggtgaggcagaaccttccaggcagcttctctttctttgaggatagcacatacaaaggccctgaggtaggtaaaagtccttcatggttgtggcatggataatgggagctggaggtggtagtgtgagatgagaccagagaggaaggcaggtgtcactattgagggctttgtaggccaagatgaggaatttggactaatcaaagcatataatttggactaaattggactaatcagagcatataaatgagcctttgaagactctaaggcaggggagccatgtgataatataagattttttaaagattacttggctgcttgcattagaaggaaccaagaagcaggaagtccagataaggcgatgtcacaatttctgattcatccattcagcagatatttaatgtgtcaatctgtgtcagacactgctcttggtactaggtatatcccttctgacctgtggagcatatactccagagtgacaactggtagtattctactcagaggacttactttgagctgtgaagtctgttgccatctttcactcttatgtcattttggtcacctgcctgtgttttgttctaatggaaacaagctgtcaccatattctttaagcttagggatactaaacctatttttagggagcaagggaagtcatgcatcctttaaaaaaccaagtgaatgctgtaggccacctccttaaaaaaatgcacatatacaccaaaatttttttctttttttttttttttttttttgagatggagtctcgctctgtcgcccgggctggagtgcagtggcgctatctcggctcactgcaacctccacctcctgggtacaagcagttctcctgcctcagcctccttagtagctgggattacagacacgtaccaccatgcccagctaattttctgtgcttttagtagagacagggtttcaccgttttggccaggctggtctcgaactcctgacctcaaatgatccacccgcctcggcctcccaaagtgctgggattacaggcgtgagccaccacgcccagccaatatacaccaaattttatatgcagtttaagacccactgcactctaatcatccccagcatagcaacccctttatcagttacctctgcatagattcaatggcaagtgcagatgctgcttgaattacaatgggggactacatcctgataaaatcctttgtaagttgaaaacaagtcaaaaatgcatttaatacacctaacctcccgaacatcatagcttagcctggtctaccttaaacatgctccgaaaacttacattaacctacagttgggcaaaatcatctaacacaaagcctattttataataaagtgttgaatatctcatataatttactgaatactgaactgaaagtgaaacacagtatgggtgtatgggtatcaacataaagagaaaaatcgtaagtcgggtcgtctgtatagggttgtgtacatagtaagatttcaatttctggcatctttatcagcagtcagttaattttgtatctttgaagtatacggaaattgtggaaatctgcccctctttttgttttgttttaggatgatgttaccgtgtttggtatgtaagggtctctgaacttatggatgttgtaagagttaggaataaactttattactgaccacattaagcaaatataatacaatatttcttagagttgtaataattgttgactttgttctttgaatgtttgtaaggcttggaaagcaggttataaactgatttctcaatgttgttgtaggtctcggaggaacatgtgtgaatgtgggttgcatacctaaaaaactgatgcatcaagcagctttgttaggacaagccctgcaagactctcgaaattatggatggaaagtcgaggagacaggtatgagagggaaaagctactcttctgtttgtgcttttgggggtttgagctgcaatttttgtgatgcgtcgtccattttcatgaagatagcaaatagcctagttgtttttattgtttacatttttgatggatataatcactggagttatcctttgtcaagtatttacatagttgttatggtaacaacagatactgcatttggactatggtatttctgtaatataaaattagagttcttttgaatatattgtcatgtagtatttgtgagaaatcatacaatgtttataatttgtaaggaagtactaattgcatttgctttctttcatgttgcatttttctccctccaaagaagtctgtttcatgagctgatgtttgtggggggtgggggttgtttgttcaggagggggtggttaggctttgttggattaaaactatttagagtaccctagaaaccctagatgagtttaagagattggaattgttaattttatttttatttatttatttatttgagacggagtctcactctgtcgcccaggctggagtgcagtggcacgatctcagctcactgcaagctccgcctcccgggttcacaccattctcctgcctcagcctcccgagtagctgggattacgggcgcctgccaccacgcctggctaattttttgcatttttagtagaggtggggttttaccatgttagccaggatggtctcgatctcctgacctcatgatccacctgcctcagcctcccaaagtgctgggattacaggtgtgagccaccgtgcctggtggaattgttaattttagaaagtagattgcattatttagtagaagaataaaatgagatctggcatagcttcctggctaatttatgacatatgtcactctgttgtgaagagtgaaactccaacccctatgtgatttgaggtttgagacctatgcattatggagcatttgagggaaaatattccagccagtagccaggataaacattttgtggcttttttggggttttaattgtttattaaatgtaaagataaggcataaatgtatacttggaaaaattttgctctcactcaaactagttatgcttctcttgttgatgcttttacttcctacttaaaataatagtaccttttccaagtctggaatcttagaaaatcactaacttttaaagttttataatgttggggtcacattgtttgctcagacccttaagagagagagggatataggaggaaattttgtaaaacattgataattactgcagcttagatgattagcacatgtgggtgagctatatactattctattccactcctagcagagaaacagcaagtcctgagccttttgtagtggtggtagacagaggccaggcagggaggttagtccaagcttcctgcagccttccctacccacaagctacctggtcctctagaaccataaccgcagtggcatctgcagttactttttttttttttttttttttcagttgaaccaatttcttaaggtttgctctaattctaacattatgatcatatgaattcaatatccatgatctatctgttctcttagaggctataaatcaattttttgtgctgtcattcccacttccagaggctggccagtaagtgttataagcctattttcaaaacttactgtatagccagccaggatcatgcctgtaatcccaacagtttaggaggccaaggggaaaggatcagtttgagaccagaagttcgagactaccttggacaacaaagcaagagcctgtctctacaaagaataattagtcgggcctggaagccctctcctatagtcccagcttctcaggaggctgaagcagggggataatttgagcccaggagttcaaggctgcagtgagctgtgattgattgcaccactgcactccagcctgggcaacagagtgagaccctgtctctaaagaagagattattgaggctgggtgcaatgactcatgcctgtaatcccagcactttgggaggctgaagtcggcagagcacttgaggtcgggagtttgagaccagcctggccaacatggcaaaactgcgtctctactaaaaatataaacaattagctgggcatgatggcccacacttgtagtcccagctactcttgaggctgaggcacgagaatagcttgaaccctgggttgaggggtacggaggttgcagtgagcccagattgagccactgcattccagtctgggcagtctgggcaaccaaagggttgatttttatcctttgaaatttaatattactttagtgtcctgacttaaaggattaatttaattatgacagaatcaaaaagaataaaaaagttttctctttgataagatatgggagtttggaggaaatgtgataagactcttaaaatcctgtctaaatgaatagtcagtgaattttttccgtaaaaggccatatggtaaatattttaggattcttggggcatagggtctctagtagctacttaactctgcttatgtagtgtgaaagtagcactagaaaatatcgaaataaataagcatggctgtattttaataaagctttatttacaaaaagctgatgggctggattggcccatggtgcagtttgccagcccctgacataaacactgttactagtgtagtaactccatactcggctacatcagaatctcttggattttcttacaaacacagaatcctaagccttaatatatcccagaaatcagtaaaattcaagttcgtttctagataaagaaggaaaaagtttgtgtattgttattttagtttaaaattgtcaggggatctgtcttgtattatttaattgtattagtcttataagagaatacttgaagatgaaaaagtggcatatgtgctcaaaatggaggatttgccctttcagattgccttttagagctctgctccctgtatttcacttgagtggttattgagaaatgatctttgccagcagttgaaaagccaaacaagattttgttttattttcttatacagttaagcatgattgggacagaatgatagaagctgtacagaatcacattggctctttgaattggggctaccgagtagctctgcgggagaaaaaagtcgtctatgagaatgcttatgggcaatttattggtcctcacaggattaaggtaattgtgtgacatcctgactagctttttttttttcttttttctctttttaaaagctttggttagaaaatgttaaagtattataataaaagtaatagccactgtgacccagactatccagtttggtgattttgctatcatatcatcctatggggccttgtgtggaggtatggtaaagtgtaagtatgctggaccagaccgcctggttttgaggcttggctccagcacttactaacattgtgactttgagtaagtctgttaactactcagtcttaatttatcctttttactatattattgtcctcattatgaggatgaaatgagacaatgtagtgaatggcctttgttaactatgaagtttacaattctgaggaatgattacttaataaggttttcatattggttcctttgtaggcaacaaataataaaggcaaagaaaaaatttattcagcagagagatttctcattgccactggtgaaagaccacgttacttgggcatccctggtgacaaagaatactgcatcagcaggtaaaggaaaaaagcagggtggaaaagaaaaacccattgtggatattgctttcgcatttttcttcaaacccactgcgtcaatttcttgggcttcagacagatttctttgccacattgtgccctctctgggggcaggggtttgggagaaagagaaaaaggaaaaatgattttaaaggagaacattttaaatattgaaaacttcaaacattggtcatcttgctacacagagtatcactaacatactagtatagatttacatttgtattcgaaatttatttatgcatgtatgagtatgaaagtatgtaataaaaccaaatggatattcacaaacattttgtaaaataggtatgatacatatatacatttagattttgtaaaatgaggatcatgtattaccctttaacacttgcagagtggctgctaaaagaattagaggctgtcaggccatttagatttatcagaatctagaccctactcaatgctgtttgaatggttgcagtgtcagtgtagaaggacctcctgaaacaagtcaagcaaggagatgttttgctgtgtggtttatttttgcccgtcaaatggtaacactgctgacattgttcaggagctttcaattatgaagtcattaagacagagtgttggtaaatgtgtcttcttggatgctttttgctcaggagtttctgattgtgttataaattactctactccttcaggctctttttggtatatgcttttatcctttctcacatggtgggagagggagaggcaggtctctggggccttttttatgaggacagtagccccattcatgagtgctctgccctcatggcctaatcacctcccaaaagcccaacccctaatatcattgccttggggtttaggatgttaatgtgtgcattttggggatacataaacattcagacaatagcaggctcccttccaatattttttaaaaactcattctctaacatgcttttatgatctctgtgtccctagctcaactagaagacttttgtcaggttctactccttatagttggcttttatattataagatattgaaagtttttttttttttctgcatcctagtccacattcttgataataattggtgtttcagctgaggacaagcaacacaggtttttccacctcagagctgagtggtggcatgaggatggaggttagggtttgcaaatctataatttgttccaaacagttcaaaatcatttagtgtgaagatgaattggactaactgactaatatcagaagttacacagtttgctgtgtttagctatgggtagcttgagctactcccaaagcaactgagtggcaagaaagggtatctaagaattataaaaacttctcatgtattatgtgtgtagctagtagaatgtttatcatcttgaaagtatgttcttgtcaaagtaaaaatgtgtacttggatttagtaattatttatataggaactttctttttcttctttcttccttttttttttttttcccccagtgatgatcttttctccttgccttactgcccgggtaagaccctggttgttggagcatcctatgtcgctttggagtgcgctggatttcttgctggtattggtttagacgtcactgttatggttaggtccattcttcttagaggatttgaccaggacatggccaacaaaattggtgaacacatggaagaacatggcatcaagtttataagacagttcgtaccaattaaagtaagtgggtttgcctgtaggtttcttgattctacattcacagtaaaaggcaaaaagagagttgagttggtggtagaagcatcctttcagcattataaaccatcaggaatgctgattcccctactgttgtatactggtatataaacttgtacctccctaccatctaaacacctatatagctttgttcttatttgtagattaataatctcttcctttgtcaactttctaaattttggttttcttctcttctgtttaatgctttcctttatgcattcctttgtcatctttggtctcttaatactttgtttcttcatatgtaccagagatttaaataagagttcaacactaggccccacctgcactccctggctccccacaggacatttccccttggtatatgataacataaacactacataaacactacatacttctggcatccctgaaagtgattatctcatttatttatgtgtgctaacctttttcgctcttttaatcttttgaaaggagctaatactatgccaagtcacacctgggatttgttaccattatcacaaatgttttcatatatgagtgacaaaattgaacacttagtgtgtgtctcagactaatagataattttctctagtgcagggaaaatggtgggactattttgttaaagttaaggaattatagttgtcttttttttttttttcatctctcagtgggttgacttgagttgtgtatgtgactatggatctcctaatgctgatagataagaatatgaactttgggatcagaatgacctgaattcagataatattctgccagtttcttgctctatgactttggaagagttacctctctgaacccgtttcttctgtaaaatgaggttgaaaatagcatctaacaattcttgtgaggattgcattagccaacacttataaagtaattagaaaagtacctggtagagagtaagtttaaagtgaatcatctcataatattgttatgaagattaaggcacaaatttcctggaagctgtcagtgcttgattactgtagctgttttttatttttaccttttttttttttttttttttttttgagacggagttttgctttgtcacccaggctggagtgcagtagcccaatctcagctgactgcaacctctgcctcccaagttcaagcgattctggtgcctcagcctcctgagtaactggggccacaggtgcgtgccaccacacccggctaatttttatattttcagtagagagggctttcaccatgttggccaggctggtcttgaactcctgacctcaagtggtcctcccagtgcagtgtcccaaagtgctgagattacaggcctgagccactgcgcctggcctgtagctgttttttagagtagaggtatatatgctatatttgcattagagctatgattcataaacaacagttgtatgtatatgctgtactgatagaaagtaacatcttcctatatacaattttttttttttaatttatttttttattgataattcttgggtgtttctcacagagggggatttggcagggtcatgggacaatagtggagggaaggtcagcagataaacaagtgaacaaaggtctctggttttcctaggcagaggaccctgcggccttccgcggtgtttgtgtccctgattacttgagattagggagtggtgatgactcttaacgagcatgctgccttcaagcatctgtttaacaaagcacatcttgcactgcccttaatccatttaaccctgagtggacacagcacatgtttcagagagcacagggttgggggtaaggtcacagatcaacaggatcccaaggcagaggaatttttcttagtgcagaacaaaatgaaaagtctcccatgtctacttctttctacacagacacggcaaccatccgatttctcaatcttttccccacctttcccgcctttctattccacaaagccgccattgtcatcctggcccgttctcaatgagctgttgggcacacctcccagaaggggtggtggccgggcagaggggctcctcacttcccagtaggggcggccggggcggctggccgggcggggggctgaccccccacctccctcccggacggggcggctggccgggcagaggggctcctcacttcccagtaggggcggccgggcagaggcgcccctcacctcccggacggggcggctggccgggcggggggctgacacccccacctccctcccggacggggcggctggccgggcggggggctgacacccccacctccctcccagacggggcggctggccgggcaggggggctgacccccccacctccctcccggacggggcggctggccgggcggggggctgacacccccacctccctcccggacggggcggctggccgggcagaggggctcctcacttcccagtaggggcggccgggcagaggcgcccctcacctcccggacggggcggctggccgggcgggggggctgacccccccccacctccctcccggacggggacctatatacaattttttaacatttggggagttgtggacccttttgaaaacctggtggactattcctagtaaaatagggttaccagagtatctgattcccacagctgggtattaaactcttgctgtattataaagtgaccgaatggaaggaaccttctgtggagagtggggagagggtacattttggacagagaatgtagtatgtgtacaaaggctctgtggggagaaatattgttctagataccaaaaaggcctgattgaagtacaaaagtgaataagggtggaggtgggatgaggcccttatcatttccaaacaaatcttaagcaatggaccaattaagctcttttccaaggattagaacattttgattaaaattaaacaagaaagacttctccagtatgttcagagaggctcatttaactatataagaaggaaagggaattcaggaaggaaatttttattatttattgatgtcaaataaaataaccctggatagtttcccaggtgggtttcgttttttttttttttttgagatggagtcttgctctgtcacctaggttggagtgcagtggcgtgatcttggctcactgcaagctccgcctcccgggttcacgccattcttctgcctcagcctcccaagtagctgggactacaggcgcccgccaccacgcccggctaatttttgtatttttagtagagacggggtttcactatgttggtcaggctggtctcgatctcctgacctcatgatcctcccgcctcggcctcccaaagtgctgggattacaggcgtgagccaccgcacccgaccccaggtgggtttctaagtcattatacctagtctgtaggttgttgttgacatctatttgtagtaggttggtatatttattctcctctgccatcactcaagtatcagggcttgctcatttctttctgcatccttaacaactgaaaacaccccctggttctgataaacacccacatctccttgcccactccgatttttaagactttgtaactgttacccatatcactatggacctgctgtaatgtaatctatcctttgttgtcaatgaaagctgagcatctgtagtcaaaagagaatctctgaatttgggcaacagttgccctccatgggattaatgattctgggtgaatcacaagatagaaacctgggaaaagcagtaagtcattggtttgattttagggatggtagtgtgctttctgtagcttgcttttcccccccatttttctctgaattttattgtttgagaactctttcaaagaaagcccctctagcagacaacattgagcagcgaaaaagaaggaaataatcatttatcatcctaataatgttaagtgagggagatgggacataaaagacttttcaagcacgattttatattttaactttgggttaaccagatggaaggggaaggtagagaatccaacttgataaatgtctttatttcacagtaaaactttatcactcttacaggttgaacaaattgaagcagggacaccaggccgactcagagtagtagctcagtccaccaatagtgaggaaatcattgaaggagaatataatacggtaaggaatgggcccaggttaatactttatcagaaagcaaataacatgcttattgggtatcttataggaacttaaaatggctcttagtgatttccaaatgtactggttctatgccaattcttagacatctcaataacttatgatattaaaatttgttttggtggccaggtgtgttagctcacgcctgtaatcccagcactttgggaggccaaggcgggcagatcacgaggtcaagggatcgggaccatcctggccaacgtggtgaaaccccgactctactaaaaatacaaaaattagccgggcgtggtggcgtgcgcctgtagtcccagctattcgggacgttgaggcaggagaatcgcttgaacccaggagacctaggttgcagtgagccgagattgtgccactgcactccagcctgggtgacagagcgagactccatctcaaaaaaaaaaaaaaaaagttgttttggtaaacggatggcttcagattttttccactgtaacttaaagtattattagtcaaatggctatacaaaggcaacagaatttttaaatgagccagaatttctgtcccgtgttctttcctttcatctccccacgcaaccacttaaaaaataatttagttacagactatgatgtcattgtctttaaacttggataggtttattaaggcattatgaattctctttttcctaatcagaagtggaaaataatttctactatatcatatatgttcaaaggatttttttctgaagattttaatttatttaaactcttgcattactttcttactgaaatatttatttccaagtttgaaaaatgaaatcagattagcttaataagcagagaaaaatatgattaggtaataaatgcaaagcctttttgttattagtcactaatatattaataatttttcaggtgatgctggcaataggaagagatgcttgcacaagaaaaattggcttagaaaccgtaggggtgaagataaatgaaaagtaagaaaaaaatctttattatgtcatatttgtgggattttttttttttttttttttttgagatggagtttctctcttgtctcccaggctggagtacaatggcacgatctcggctcactgcaacctccgtcccctgggatcaagccattctcctgcctcagcctcccatgtagctgggattacaggcatgcaccaccacacctggctaatttttgtatttttagtagagatggggtttcgccatgttggtcaggctggtgtcgaactcctgacctcaggtgatccacctgccttggcctcccaaagtgctgggattacatgtgtgagccactgtgcctggcccattatgtcatatttaatactatttcagttatttacagcattggtcaattatagaattttagttttttgttggtatgtttgtttttttgagacagagtctcgctctgtcacccaggctggagtgcagtagtgcaatctcatgtcactgccacctctgcttcctgtgttcaagtgattcttgtgcctcagcctccctggtagctggattacaggcgcctgccatcacacctataatcatgctggccaggctggtctccatcttttggcctctagtgatctacccacatcagcctcccaaagtgttgggattacaggtgtgagccactgtgcctggccgaattttagattttttaaacctaatttttaccatagttgagctcttcaactatgaagaaatgaaacttttcttccagtgccattcacattagtgtttcctgtttgttttcttttatccattttgaggggagttataatttagaatcctcactcttaaccactgtgttggagttcttccattctcagatttcttagagttttcttatttctttgattttcagaaccgtggacagaattgtcattatctgataagatttttgttcctttgagctgttttgttttatttttaacacattagaacattgccctcagctagagtcacaattttgggcttccctgaaaaaacggaagattttgttctccttaattaataatggtaattaatgatgatttttaactgaataaaattgcaggactggaaaaatacctgtcacagatgaagaacagaccaatgtgccttacatctatgccattggcgatatattggaggataaggtggagctcaccccagttgcaatccaggcaggaagattgctggctcagaggctctatgcaggttccactgtcaaggtgagtgttgtgcttgttgcccattagatactgttgtcagtaatactcccagttccttatttagggggcagttgggaagtttcgcagatcttgaataatttagttattttggtgatggcatcctagatgtcctttattagttgtattccagacaagatattattaaggctgctgtacattgtgactttattatgaagatcgacactccgccgggcacagtggctcatgcctgtaatcccaatactttgggaggctgaggcaggcagatcaccaggtcaggagttcaagaccagcctggccaacatggcgaaaccccatctctactaaaaatacaaaaattagctgggcatggtggcgcatgcctgtaatcccagctactcaggaggctgaggcaggagaattgcttgaacggggaactgggaggcagaggttgcagtgagccaagattgtgccactctactcctgccatggctacagagcgagactccatctaaaaaaaaaaattaaaaaaaaaaaaaagaaaattgacatcttggattcacattatgaataaaaagagcttgattaatcaagttttcagcactgttgttgaatagtgtactttatatccatatactctaaacagttgtattttatgtcaatttcatcattaccagtataaataaaatgttctgagtctttttatggcacttatctaggctataaaaggacttgaggatttaggtaatggtgtcagtgtacaaagtagcttaaaccactattcaggccttattacccagtccttagaaaatatctgtcttagaggccaggtgcgttggctcatgcctgtaatcccagcactttgggaggctgatgcaggcagatcacgaggtcaggagattgagaccattctggctaacatggtgaaaccctgtgtctactaaaaatacaaaaaattagccggccgtggtggtggcgggcgcctgtagtcccacctactctggaggctgaggcaggagaatggcctgaacccgggaggcggagcttgccgtgagccgagattgcaccactgcactccagcctgggtgacagagtgagactctgcctcaaaaaaaaaaaaaaaaaaaaaggaaaatatctgttttaggatgttgaatatgttaaatgttatattgaattttaaaatgattttttaaaagtcagtataggatgttaaaactcttcagtatgtttcatgggactagatggccagaaaagaataaagacagctgttttttaaaaaggtttccagaaacattagttgtaaagaattttggcattacccattttccttacattggtttcagttggttacagtaatgggaatctcaaaaagtgatgctagcaaaatttgtgacctggggttatttgggatgtagcataataaaatctcatattttgaattaatggattgagggttaaaaaagattttgaatgccagattgactgattattgagggaatagcagttggttcgtattactatttagaataaatttaacaagactacctctttgaattacatcttgtatgcattgttgcagttgttgagtatctggtacctcaatatagcttgagattggatgcacttaatttattcttaaattcatgtctcagtggtttccttaaaaaaaaaaggctaaaacattgaatggagttgtactttaaagtaaggggtacagctgggcacagtggctcacacctgtaacccagcacattgggaggctgaggcaggaggatcacttgcccaggaattcgaaaccagcctgggcaacatggtgaaaccctatctctacaaaatatacaaaaaatgagatcggtgaggtggtgcgtgcctctagtcccagctacacagagcgctgaggtggaagaatcacccgaacttgggaggtgaaggctgcagtgagctgtgatcacacactgcagtccagcctgggcatcagagtaagaccctgtctccaaaaaaaaaaataaataaataaaataaattcatggatctttttgtttctgttggacatactcttctctgtctcagccgtaatctaggaagacctctacagacctcaagaactctctttatgcgtgcaattccatcctttctggttttctgccttgcaacttgaaaccaccttggcttccaggaaagaccctgggctctgtttgagctctccctctctgcactgaggcttagaaactgtctctgagcagtaagctggagcagtcacaggactcatctcatttgtttcccttcccgcagggatcacaggcttgcactgcctcttggtcgatgtcttaaaatgtgttgcttcatccctgtctggtttcctagttgtttaaagcaggagggtaaatgtggtccctgatacaccactgtggtataagtggttgtctgcctttacttttaaattagaattccaaggttctatgtatttttttttagagaaaatggattatatttattgtttctagaggggagcatattttaaagattttatctccctgttttagagagtgagaattgtacttctcttattttaaatgcagaatgttactttggatcgcctctgtgtataagtataactgctaggcttttaccagatggcattataaacccttggcatttacataatatattttttcacaattcacagcatattaaaagttctgagaaatctgatagaggaactcatttatttgcttaatccagttctttacaagttcatttgactatggaatccccttgtcatctatacctgttaacatcatacagtatgctttgaaaaatagtcctaagagttaacctttttttccccatggtcttctttaccattttaatggctgcatagtgcagttttacattaagggtgtgaactatagaaccatttcctaattgggatttttttttacttttttttgagacgaagactcactcttgtcccccaggctggagtgcaatggcgtgatcttggctcactgcaacctctgcctcccgggttcaagcgattctcctgcctcagcctcccgagtagctgagattacaggcgcctgccaccacgcccagctaatttttgtattttttagtagagatggggtttcaccatgttagccaggctggtctcgaactcctgacctcaggtgatccactagcctcagcctcccaaagtgctcggattacaggtgtgagccactgcgcccggccctaattgggatttttaagccattccaacattgccactattgagtactacagcaatgttcagttaatacatgtagccttttctgtatatcaaactattactatgttagtattgtatattatagtaaaatatagtaatatatcgtactatatatctatatgttaaattataatatctataatcttattatagatttctaaaggtgggattattgggccaaaaggataaaatgttttatggctgttaatattacctaattgatgttttaaagaaatcttttaattttttatcactgataatccaaaactatcagatttgggtacaccagtattatttttggctgctttattaaggggaaaaaagtgtgtcattgttgataacatcagttggttgatggatggagaagctgcatgaatctttttctcatagtcttaccagacttcacacttctatccactaaacttttcaaataagttaatggttctcaatgtagtagattaattaattaatatctcggattgagacttcacatactttggtagaaatttattactcttatatcctttgtcaattttgacttttttgaatacctttttttttaagttataactttgcctattataactccttacctccatttttaaacagtgtgactatgaaaatgttccaaccactgtatttactcctttggaatatggtgcttgtggcctttctgaggagaaagctgtggagaagtttggggaagaaaatattgaggtaagttcttttcctcttttctcctatgttatatcactacttttttttcttcagaatttaaaatatatagaagacttaaaaaatagtacaaagcattttcatatacccgttatccagattcatatattactaacattgtgccaatttattttatacacttttagtagtctctcattctgtgtgtgtgtgtgtgtgtttctgtgaatcatttgagagtaagttgaattctcctttacccctaaatactttattgtgtatttctatgaacgagggcattttcttatatagccgtagtgtagttaccactttcaggaaatttggtattggtgtaatatttttatctgatttaattttcattttctaattctgtcagttgacccaatcgtatttccttttactttttaaaatcacatttattgatttctctgggttaattataggaaaatgaaaagaaaaaataaaaatttttcactgctcctaccattagtactacttgtttctagcattactctctaatttgtactaacttttctgctcacattttatcatggagtcaaagaaaatgcacatgaaatacactgtttctgtatacacaaataatgccacccaaaaggactgctgttttaaatcattttagggaaaatttccaataaaaccttttgaaagaccaaatttgtgaataagtcaatttttaaaaataaaaagcctattttaaatctcttaataatctttttctttattacatgcactggtagtagcatgtaatatgttggtctattagtaacacattattaacctttttttctgattataagaatagtatatctggctggcatggtggctcatgcctgtaatctcagcactttgggaggccgaggtgggtggatcacctgaggccaggagtttgagaccagcctgaccaacgtggagaaaccccatctctactaaaaatatgaaattagccaggagtggtggtgcatgcctgtaatcccagctacttgggaagctgaggcaggagaatcgcttgaacccgggaggcggaggttgcagtgagccaagattgcgccattgcactccagcctgggcaacaagagagaaactccgtctcaaaaaaaaaaaaaaaaaaaaaagaatagtatatctttattataggaagtttcaaaattaggaaaatatcaaaaaggaaattttaattcatgaagagataactgctattaatatttttgtgtatttccttccagtttctttttctctaaatattttgatgcgtttttatattttatgtatatatatatgtgtgtgtgattttgtgtgagtatgtatgtcttaatgtttttcaaagtttgatgaagttacagttttaggtccaagcttaatattaatgttatgtcatgaacatttcctgtctttaattctctaaaatctccatttaaaaaaaatgtgtaattcttcttttaaggggtgctatactgtaatttgttaagccattctttgattaggttgtttacagtttttcattattataaatagaattgacatcttcataattcattgtttctcagtttattttttgaagatagatttcctgtgtgagtgtgtatatacatgacatacatatataattaaaatttgaaatttttaatatatatttcatatttcttgatagacaatatttaagttttttaaaatttgctttgttattatagaagtataacgtgtttgagttgaagaaactttgaaaaatgtaagggaaagaggaaacaattacttatggagttagagctgtaacagcaattgttagcaatttggggtgattcctttaatttttttcctatataattgtgatactatgatactgtacattaaattttgtaacccatgtttatttttaaaattatattatttatcacaacatcgaagaacacttgttatgtcttcataatcagtttgctcgtaaaaggtagcgaatcatgttttgaactgaggctagcagctggaggaaaaaaaaaatccatttagtcaaccagcaattaaattagtaaggatgctgtcgttccacccttccttcctcctttccttccctatctccttccttctttccttccctatctccttccttcattgcttttagtgaataatgccaaaggaggaaatgtcttttggaagcatttagcaagagaactagataattaccttaattgatcctggcaccttatttgtttcttgcccaagttgtcattcacagtggataacaagatagtattgagtttgggtgtgtgtgtgttttcaatgtatgacagcaggtaattaaatggcttatttctgtcattcccttgctcttttttgttattagttagggtgtactattttgaggtagagatatacataattaagggatgagcttatagcaaaagtgcctgacagcaaggagttgaaagtcatttaccttttgaccagattcctatttattccatgaattttattatttaatgaaagtctacttattaaagagtctctactgtctttcaccatatatgtttgacagacttaatgtttaaaataatgggtctaaattttgcttttgtatcttcttaggtttaccatagttacttttggccattggaatggacgattccgtcaagagataacaacaaatgttatgcaaaaataatctgtaatactaaagacaatgtaagtttaattctcaatcctttccagtaattttatttagttgttgttttttgttgttgttttttttttagatggagtcttgctctgttgcccaggctggagtgcagtggcgctatctctgctcactgcaacctccgcctcccgggttcaagtgattctcctgcctcagcctcccaactaactgggattacagacttgcgccaccacactggctaatttttgtagacgggggtttcaccatgttggccaggctggtcttgaacacctgacctcgtaatctgcctgtctcggcctcccaaggtgctggaatgtacaggcgtgagccaccatacccggctttagtttttaatatatagcttagttggtcacatggtgcagatggcattccttcagtatttcgcgtgccagttgtctcagctgatagatatcagcagctggcaaggaccttggctgcactgcctgctgccccctcatcttcactggcacagggccctacacttagtcaacaggcagccaaaacttactgagtgaaggaaccaaaggcacaacttgagaactgtctatgtttgtgtttatagaagaggaacaataaagtcatcgactatctaaatataatgaataacaaaaaagaacaggagcaatgcacgtttgatcctcagcagctggcactactaagaaagagctcttaattgagttctaagatttcattgcctgatgctacatgtaatgctagtctggtgttattacgtgtaaatctaatgtattttaagtgctttttagtagtcctcccacagatatactttattcataccataaacccccaactgtccaggtgaataagagtacaatatgcaatatattacagtcctttttttttttttttttttgagacggagtcttgctctgttgcccaggctggagtgcagtggcgtgatcttggttcactgcaaccttcgcctcccaggttcaagtgattttcctgcctcagcctcccaagtagctgggattacaggcacccaccaccatgcccagctattctgtatttttagtagagacggggtttcaccatgttggccaggctggtctcgaactcctgacctcaggtgatccgtctgccttggtctcccaaagtgctgggattacaggtgtgagccaccgcgcccggcctattacagtacttttttagcagaaacctgtgaaagcctgtgagcaaactctatacctcacagggtttttttccatatatatgaaatgagggattggataattcatattttttaaagttttttgactgtgggacactggtatattcatatacacacactctctttaatattgactcttaagaaaactgatctttttaacttagctaacactttttaaagaaacgacctcagtaaaaatataaatgatgttaaagaatctgtatgttaaaagcctagtaaactgataatgttttaatcttgaaatttgaatataattaagccatgtatcctatttggaaactactgctttaggcagtaggacagttacaggttggttttttggtaaaaccaagggttttagaaaacattttcttgaatcctctgcaaaaaagattcaaatgaatatactaggataacccataatgagctacacagctaacataaataacaattgtatatatagttgtctttttctttttaggcaaattttctcaaaagtttatttatatgagtatacattagatatcacttttactgcagacaaaaggagaaaatgtcagccattctcactggcagtatattaactgcccctgtctcactgagagagacttcaattgctcatagcagtcagtgaaaccttgaaggtttccttcctaccaagcaaatccattttaaccatatgtattttgctcttttttcaatgttacatttgttcaaatggcattgctagaataatgtggaaaataattttcctaccaataaacctgtcagtagttgaggtcataagtagggtgacagtgttttcggttattttcatagataaagatagtaatagagaagatgaatatctgttactgctcttttgtcatgagtaatctgaggtaaaagcttgtagaacttcactatccctggggcgtgctttattcattttgaatcagtcacttgacttcagtgtctaaatgtccttgattctaaattgtacttacaatgtttattatctgctggcttttgttctctgctattttatttttttttacataaaatatttataataaagatgaagaaggtactcaccatccaaagtcaaggaatgttaacatttttgctgtatttgtttcagggcttttttcttataagagataaaccatcatatatgcagtttataacagcttatatttattgagcacttactgtgtaccaggcactatagagctctacaggtattaacttatttaatccttacacagtcctgtgaggtatatatgctattgtttccccctttttatagatgaggaaactgaagcacatggaagttaagtaactgtgctcaaatcatttacctagggaagggcagatctgtacatttattctcacacaatgtagataccatgctattaactattatcttatgcctatgcagtcttctgtcttccttcacttcaaaaggtaaaactttgaagtcgaagggtctcatgcttacgttcttatgtttgccacctatttatgaatgcatacacattatacagtgttcgtggtttaattgcaggtggcatcctcattatgtagagctctgcaactttttaataatctcttgttttttgagaccctttccacattattacatggaaatctattttaagtgctttttagtagttcctcctatggatacgctttattcataccataaacccggaatcgtcagggcgaatatgtgtaagagtaccatatgcaatatattacagtccttttgtcaacagaacaacctcctgattgtttccagggagtgatggaaccttagacaagctctgcaccccacagcctgagttgcctcatctgttatgacgagattgcactagatagtctagtcagagtctgcgctgaaaatctatcagctcaacagtagagtgcatcagatttctctgcttttggcagaggtagccagagtttgagatttcaaatttatccaaaataatttctacacaggtattttagagtgccagacatttttcttttgctttcaaaaatgttttcagactttgctgggcacagtggctcacgcctgtaatcccagcactttgggaggccgaggtgggtgaactgcttaagctcacaagttcgggaccagcctagacaacatggcaaaaccccatgtctattaaaaacaaaacaaaacaaaaatgttttcagactttaatggtcttgcactatttatcctcaaaaccttatttaaaattacttttaaaattttatttgtattttattttttagagacagggtcttactttatcacccaggatagagtgcagtggtgtgatcatagctcactgcagcctcgacctcctgggctcaagcattcctcccacctcagcctcccaagtagctgggactacagatgtgagccactgtgcccagctaatttttttttttttttttttttcctgtagggacagagtctccctatgttgccaggctggtcttgaatgcctggcctcaggtgattctcctgcctcagcctcccaaagtgctgggattacaggcttgagctatgatgcccagtcaaaattttaatttgaatgactactcttaagggtcccagctattacagatagcctctgtggagctgagatgatcaaatacaggacgtgaggacaccctgccctttgataatattttccagaacattttggtgattaaagacttgtaggcatctttgccttttgtattttttctcataaaattgagtaaacacttgtagctgtcccttgtctctttgttcctgtttgaagtgaacatcatactctatgttttggttcatgttggggagtctttagcctaagtagctgttagcagcagtcattaaagtctctggccatttttccaggtgcggtggctcacacctgtaatcccagcactttgggaggccgaggtgcgtggatcacctgagatcaggcattcgagaccagcctggccaacatggcgaaaccccgtctctactaaaaatacaaaaaaattagccgggcatggtagcgcctgcctgtagtcccagctactcgggaggctgaggcaagagaatcgcttgaatccaggaggcggaggttgcggtgagtggagatcgcgccattgcactccagcctgggcaagaagagcaatactccatctcaaaaaaaaaaaaaagtctctggtcattttctttttttgagatggagtctcgctctgtcgtctaggctggagtgcagtggcacgatctcggctcactgcaagctctgcctcctgggttcacgccattctcctgcctcagcctctcaagtagctggaactacaggcacccgccaccacgcccggctaattttttgtatttttagtagagacggggtttcaccgtgttaaccaggatggtctcgacctcctgacctcgtgatccacctgcctcggcctcccaaagtgctgggattacaggcgtgagccactgcgcccggccagtctctggtcatttttgagttggatttttaagaaacagactggagaaatgctctaagctgtgtaggaagaggaggggagaaaaatcagcttaattgcattattgtatttttttttgccttaggaacgtgttgtgggctttcacgtactgggtccaaatgctggagaagttacacaaggctttgcagctgcgctcaaatgtggactgaccaaaaagcagctggacagcacaattggaatccaccctgtctgtgcagaggtgggtcatctacacttatacagtttaaaatgtttaaaatgtgccacatagaagcacaccacccagcttatacatggcagatgtaggaccctgagtttgatgatgattcctcaaaagagggctttgtctctaaaaattagtttttgtctttcaatactgattgctcatggtatgaactggaggcttccgtcatgtcgttaagtggtaaaaattatgagagtgatttatagagctgtgccttaaatattttatttatcatatcttctaaattattttcatggcaatcagttaataatggaagagcttcaatcttagttattccacagctatcttgaggctaattgatactgtctgcctcttcagcttatggtatcagtgaatgagatttgaaaatgatgctttcaaaagatcaaatgacagtagaactagaaattgaccaatctaggcctctgggtgtcagtgtttcttcgctaccagtgatcatccaagagttgaatattgtaatacttaactgcataggaatggtaagccaaaaatgtgtttatattggagaacttgggaaggtgtgggaggaggcacgtcatactataccagcttatatatggagttgaaaattgcagtgattatctgttgtagccagtggcttccaaggtgtacattgcacttgcaaacacgcacacacacacatatgcacattgttgccagatttcatccagcagctccatgactggttgttctgtctgttcatggttgcttttgtacaactgaactcattgctgagtatgtggaatgtcagctttaagacctggaaaaacattttagctttcttttgctttgtcttctctgtgatcgagaatcctcctctattaataggcacctggctgggatataagcctaaaatattaacatgttgagagattagggcatcatttatttctttcatttatagaaagctgctgtttttgtgacggaaatagaattaagcttcaaaaaaatataaaaactgaagtcttgattaatgcctttaatgtgcaatagatcttttattcagtgtaatgactcaaactgcctgtgttgggaaggagccaattaactttgctttcttgagtacattagtttcccagggctattgtaacaaagtaccacaaactgggtggcttaaaaatagcagatatttcctccctctcagttctggaggcaaaaaagtccaaactcaagatgtcagcagggccaagctccctccaaaggcactagggaagaatcctcccttgcctcttcttctgtcttctagtagcaatggcaatccttggcgttccttggcttgcagatgtatcactttaatctctgcccccctcttcacatggcctcatcccttgtgtgtctgtgtccaaatttccctcctctttcttataaagaaactccagtcattggattagggcccactctaatccaacatgatctcattttcacttgattacatctgcaaataccctatttccaaattcacaaatactgggggttacgacttgatcatgccttttagggttatggggacacaattcaacccacaatagtgagtatatttaaaaatgtagatgccatttcaagatactcacaagcttcaatagccatttttgatagggacgaaggaaaagacgattttattgtcttttgtatatgagtgtctaattttttgtctgaattcagctctcagtgggcttgttgaaagactgctgtgtgctggcctctgaccccctcaggaggctattgtgctgtgatccagcagcagcgtacatggcagcatctggcagggtgactgccagctgagcagaaggatgcagtgaggacacaggacgtctcctgaagcccatggctgtggggaggtcagccaaaggcctgttctccttggtatgcctggcacatttgaggctgtgcatctccatctgttggtcctcttatgatgttgaagctcagaggctgaatgttctggtgctttgataggactctgatactttgttttccccaagctgttggctgattaagaagataaaaaaaattgggtgaaatcgcactctgtgaacacacttctcaagctgtgtacacagtgccgtgctggacactggggacacagcagggatttgagataagcttaggaggagaggaggcagctaggtgatgtgccagttaacaattctgcctgacgggtcctaggatcagggtagatataaagtgctggaggcactggggtgccacatttgtggtctttgcctcagggattcttgtgatctgtttttttactcacagagcacttctgaccccagatttgtgggggttttgctcacacgaccaattctccagctttctagacaccagctgggtgtctagaaacaaccaattgtctagaacaaccaattctccagctttctagacaccagctgggtgacctctaatgtaactcaattctgataccagctgcctggagttagcatcagatcctgcaagggctcattcccataagactgcctccactgcagaggccagtgtcaagcccaggcctcctgtacttctgacctaccagctataaagtcaaggggttcccatgataaattgctagcatggctcacagaactcaggaataaactttacttatatttacttgtttattataaaggttgcaactcaggaacagccaaatggaagagatacacagggcaaggtggttgtggggaggcgggggacaacagagcttccatgtcctctctaggtgtggcatcttcccagcaccttgatattcaccaacctggaagttctccaaaccccttatttaggggtgtttatagaggtcccattatgtaggcatgattgattaatcattggccattggtaattacccaatctcctgctccctccccagatgtaggggaccagaactggggctaaaaattctacctctgatgacatggttggttcctctggcaaccagctgccatcttgaagctatctagggccccaccaagagtcacatcattagcataagctcaggtgtggttgaaaggggctcattatgaatagcaaaagatgctcatctcactagtgtcactcgggaaattccaagggttttagaagctcccttgccaggaaccagggacaggatggaagaccaaatacatatttcttctcatttcacaatatcgtaggatgttggggcaggatgattctggagggagttcttacctaagactagaacaatgtgtgagtgttagctagtgagagaacactgtacaaaaggcctgggtgggaaagcggatggctcattcaaggaactgaagaagaccctcaatattggcatagcttaaagagcttagagagttaaaaatatatatttattttttatttttttgtatatatatgctggagaaacaggtgggtaagtgatggtcttgtaaactaaggaagggtattttgactgcctttggggcattgtgattcagccaaaaggtctaaagcagggagtaatatgatcaggtacattgttcagaaacattcctccagctgcaccgtggaagcgggactgagcgagcaagtgaagtggcagatccagttatgtggctggtgaggtgcatgagaggagatgatagtggccggaggtgtggcagtggaaatggagtgacacggttatatttgagggcagagttgatagtacttggcagctggctgggaatgggaagagggagagctgaagaccactcaggtttgtgtcctgcagcaggaagtaatagcaagagcagactcgaggtgacagcgaggacgaaaccactgatgtgtgtgagggcctgctgtgtgctgggtactgtgtccctgcctgttgactaacttagtcgttgtgagcaccccatgcggtggatgcggtagtatatctatttgacagacgaggaaaccaaggacaaagaggttgagtaacttgcccatggtaacccagcctggtcatggccgagctgggattcaaacccaggcagcccagaccccaaagcaccacattgtgcagctgatacttcatctccacagactgtcctaccatatttggcatagaatttaaaaatggaaatgattcttggtagcaacacgaatgtagtggagacacacagacctgggttgtaatctcactcagccaattcctcttagtgagacctggccataccacccaggttttcagaagcttagtttccacattaaataaagtaagaggccaggcgtggtggctcactcctataatcccagcactttgggagcctgaggcgagtggatcacttgaagcccggagtttgagaccagcctggccacatagcaaaacccaatctctaccaaaaataacaaaaaaataactgtgcattgtggcgtatgcctgtaatcccagctatgttggagaccgaggcacaagaatcacttgaacccaggaggcagaggttgtactgagccaagatcacgccactgcactccagcctgggcgacagtgagaccctgtctcaaaaaaaaaaaataaaacaaaatggcctggctcagtggctcacgcctgtaatcccagcactttaggaggccaaggtgggcagatcatctgaggtcaggagttcaagaccagcctggccaacatggcaaaaccttgtctctactaaaaatacgaaaatggcctgatgtggtggtgcatacctgtagtcccagctactcaggaggctgaggcatgagaattgcttgaatctgggaggtggaggtttcagtgagccgagatcacgacactgcactccagcctggagcgagactctatctcaaataaaaaaaaaagtaaaataaaataagggaatatctaactgtagggttgattaaaatgcaacctgtaaagtgtgtaggagagttcctggcatttaatagatgccgaatagctgcacctgttagctgttttttccccaggatattatagatgtggctgtggcttgggaggggagacgatgtggctggactgaaaggtcatcatgccagtatttttaatgggggttggagagagatacatattgtgaaaaagctccagtgattttttttttttttaaaccctggttgtgaactacttgcgttgatactggattttgaaaaaccaaaggctttaaactcctggttatggacattttaaaaaattatttttaattgacacaataattgtacatatttatggggtgcatagtgatgttttgaaacacagagtttatagtgatcagattagggtaattagcctatcaatcatctcaaacattgaccatttctttgtgttgagaacattccatatccttctagctatttgaaagtatgcattattgtttaactgtagttatcctaaggtgctatagaacatattcctcctatctagctgtagttttatatcctttaacaaatctctccctatctccttctcccaacccttaccagcctctagtaatctctgttctactttttacttctgtgagtaagctagcacagccactgtggtcaacagtatggaggttcctcaaaaatctgcaaatagagctaccatatgatccagcaatcccactacttaactgggcatttatcccaaggaagtcttttaggggttcataggaggaactcttttctctgccaaatgctgggttctgacttggatagtatttggatttgctactggacccactgtttttatcgtccagacatattctgtggggaatgtgatattctgtggggaatgcggttcagaagtggtccacagaatgtttgttattagtccataatgatagaaggctagaaacgaagaagaaagtttagaaattttaacaataatttgacagtgactgatctagtaataaacaatggtgttttaattttacatgccttttaaaatttcatttccccagtacattgtcagtgaatttcacaagtgttagtccagtggatgaattagaaataataataatttttaaaccagtcctgagtactactttaaactgagtgctcaaaaatagctgcagctccagagccagctgtggtaggctggcacagtgactcactttggtaaaaatcctgggcaattgagagcagtctttgactctgaggagtaattacttacaaaagttgacaaattccttagcaaagtaatttccaaagggaattactagaattctagaattgctgtaagaggagaggctactcttgtttgtcctgtgtgagagggattctcagcgcctggggcattagcaatgcatttgccgtattcagtgtgagatggggttggtggtcatttattctgaacacctgagccgcagtcattgagtaggaaacggattacacatagttatgaagttcacttgtagaggagaaaaacaatagttcaagaggaaaacatttgaaaatacttccttgtaatgtcttaaatgaattttagtgccaaatattaaaagtttttgtgttttttgtttgtttttaatttaatagtcaatataatcccactctaaagtgagggagccttctgcggctggaagtggtggggacagataagagtatgtgaggtggaaagcctccagcagctcctgacccttgtacgagtcctgtgtgttgggatggaagggcatggaggctgccccttctgctcattttttaaaaatacatgtttttataaaaattctaaaacagttgtgtacgaatgaaatctgtcaattgacccaagcagtttttttcatttatttgagatagggttcctgtcacccaggctggagtgcagtggtgtgatctcagttcactgcagccttgacctttcaagctcaagcgatgttcctgcctcagtctcctgagtagctgggaccacaggtacatgccactgtttccagctaatatatatatatatatttgagacagggtcgcattatgttgcccaggctggtctcaaactcctgggctcaagcaatcctcccgccttggcttcccaaagtgctgggattgcaggcgtgagccacggtgcctggccagttttttatttagactgatcaacgatggcagtttggcttcctccatctttttaacataagaacaacatcaatatgagaaaaaacagataagagctcattttggtggatttagttttgtatccacatctcctacaagttctatttctaaatcagtttctgagaaatagaacccaggcttgcaaattgataagcctggaatttgtttaaatgtattctttggctctttatttttttcctcattataaaaatggaaaagaaagcatgtttgaattgcccttaatacccctttctaacacagttatttttattatcatgtattgtttccccgtcctcatctgtactcctacattttttttaaacaaaggaattttattgcctttccaaaaaagttgtactagtttataatgtcaccagcattgcatataagagtgctaattaaaatgttgcaaaattcagtgtcaatgttttttctataatgagtataaaaaggataactattggccaggcacagtggctcatgcctgtaatctaagcactttgggaggccgaggcaggtgggtcacctgaggtcaggagtttgagacaagcctggtcaacgtggtgaaaccctgtctctactaaaaatccaaaaattatccgagcatggtggcaggtgcctgtaatcccacctactcgggaggctgaggcaggagaatcgcttgaacctaggaggcagaggttgcagtgagccaagattgtgccgctgcactccagcctgggtgacagagtgagactgtctcaaaaataaaaataataataaaataacgatttcaaggattttagcatatctttgctaacaatgatgagcctctttcttcttataatgatttttttttttggatatgaattatccatattttctaatgcatttgtattttaaaactttttaagatactggccattagtatttggtctggatttttttgagaagtaaaggctttgtcaccctctgaggctaaaacagactaaagacttttctcagtattgttcctcccttacacaaaactgttttcccccttattcacaagtatttttgtttttacgtacaggcaatcttgagcagtagcaagtaaagattgtctaaaactgtcaagtccacaaccatcaaatgtttgcaaggatatgaaacaaggagaacttgttagtcactgcaaatgagagtataggttggttcaggtaccttgaaaatctagtcaagccaaagtttcacctgccctctgactcagcagttgtactccagctctgtgtgcaaggagatgtgctggaatgtcacagcatcgtattgcaaagagcatattggcaacagcttggatggccagcagaaggagcccaaatgtgtgattcatattcactagtcgaataattgaatactacaatatacaccatatatactacactgtatgtgttgttctatactatagtgattgactcgaactccattcagtgaaaaaaatggaagaattagctatttgtatccatatgggatacaaaaaagcagggtaacaaaagaatctacatcatcttgccatttgcaggtaaagcttcttaaaaaaacaagagaaatgcaggaagaaatgcctaggaatgataagaccaactcggtggagggaaaggaggaaaaggccaatggggtggcacacacagggctaactgggcactttatacccttctttatatccaaaatattttatggtgaatttcttttagagggttgacaagcacctgtgggtacctgatctgttttaatcatcctcatgctaacaaaattcttcagtagatataacctaaattttttttctctttcatcttggttttaaaatgtcttcccccttttattctctggagaaatagaagatatccttgatcatactacttctctgttttattcattttggtagtcgcctaagatggttttaatgcatatggcattatctgaactgttccctgttacctcatttgctcaggcatctgaagatgttgtgctttctcttcccctgcaggtattcacaacattgtctgtgaccaagcgctctggggcaagcatcctccaggctggctgctgaggttaagccccagtgtggatgctgttgccaagactgcaaaccactggctcgtttccgtgcccaaatccaaggcgaagttttctagagggttcttgggctcttggcacctgcgtgtcctgtgcttaccaccgcccaaggcccccttggatctcttggataggagttggtgaatagaaggcaggcagcatcacactggggtcactgacagacttgaagctgacatttggcagggcatcgaagggatgcatccatgaagtcaccagtctcaagcccatgtggtaggcggtgatggaacaactgtcaaatcagttttagcatgacctttccttgtggattttcttattctcgttgtcaagttttctagggttgaatttttttcttttttctccatggtgttaatgatattagagatgaaaaacgttagcagttgatttttgtccaaaagcaagtcatggctagagtatccatgcaaggtgtcttgttgcatggaagggatagtttggctcccttggaggctatgtaggcttgtcccgggaaagagaactgtcctgcagctgaaatggactgttctttactgacctgctcagcagtttcttctctcatatattcccaaaacaagtacatctgcgatcaactctagccaaatttgcccctgtgtgctacatgatggatgattattattttaaggtctgtttaggaagggaaatggctacttggccagccattgcctggcatttggtagtatagtatgattctcaccattatttgtcatggaggcagacatacaccagaaatgggggagaaacagtacatatctttctgtctttagtttattgtgtgctggtctaagcaagctgagatcatttgcaatggaaaacacgtaacttgtttaaaagtttttctggtagctttagctttatgctaaaaaaaataatgacattgggtatctatttctttctaagactacattagtaggaaaataagtcttttcatgcttatgatttagctgttttgtggtaattgctttttaaaggaagttattaatatcataagttattattaatattttgaacacaggtggatgtgaaggattttcatttaaaaaccaagtggttttgactttttctgttgaatgaacaactgtgccttgtggaatttttgcagaagtgtttatgctttgttagcatttcaacttgcattattataaagaggtattaatgcctcagttatgtgtttgtcaatgtactggctgaggattctatctcagctgtcttttctaactgtgtaggttgagttttgaacacgtgcttgtggacatcaggcctcctgccagcagttcttgaagcttctttttcattcctgctactctacctgtatttctcagttgcagcactgagtggtcaaaatacatttctgggccacctcagggaacccatgcatctgcctggcatttaggcagcagagcccctgaccgtcccccacagggctctgcctcacgtcctcatctcatttggctgtgtaaagaaatgggaaaagggaaaaggagagagcaattgaggcagttgaccatattcagttttatttatttatttttaatttgtttttttctccaagtccaccagtctctgaaattagaacagtaggcggtatgagataatcaggcctaatcatgttgtgattctcttttcttagtggagtggaatgttctatccccacaagaaggattatatcttatagacttgtcttgttcagattctgtatttacccattttattgaaacatatactaagttccatgtatttttgttacaaatcttctgaaaaaaaacaaaacaatgtgaaacattaaaattaaaaggcattaataatatccacgtgtgccttcttactgaatgatggtcttgggagtctttgcaagagtattgagtagatctctgatattgtgttgaaaagctagctgctgagtaggctccaatgatgctatgctgatttaagtatagaagaactaatcagttcattgccatttcccatcttctggcagtatcaggcacatagatggtcaataaatgtttccagaaatgttgattaccatgttcagattatgcattcacatgcacttaatcttcttaggtatcactttttaagcagaaactcctcttttatgtaatctttaccaaaaaccttcccagtttgtacttgtttttgtggtaagtagttgcagggtgctagtaataacaacagctaaatgagtgtttactgcaacacgtgcaggcactgtgcttgacacaccctggctgatgtgatccttacaacaatcctattagagaaggtgcttttgtacccatttatagatggagaaacaggctcagaagtgtaagtcactttcttaggattacacagccagttaatgcatcacgtttttgaggccagagttgggtctgtgacctcaaaggcgctacctcttagttacctcgcagtgcagcctcccattcatctctgacaaatggaagcttttaggtctgctgcatcaattcctgggacttcacattttcacatgccgtcaagcaatgctgtctacacgcttaataaataccttgtcttgagatgttctaacactttcctaactggactttccaccgccagtttacttcccactagagccaggctcttattgcctgaacttccctgtctcaagcctttgaggttttcccaaggcctgtaactagacccacagtcccctgccagaccctgaacctgttatctgcagctctagcctgcgctttcccttgcctgttctggctacacctgctctatgtccccatataactactagcctccctcaaaggtcacctgctctgcgtaacttccagctggttctctacctctactcccagggtactctgtattgtctctagagctctttgaattactctgcatggagtgtagtgtgtgtttctgtcaccaccactagataatgagggttctttacctctgtgtgccccacagcttctagcacaaggtctggcactacagaagcacttagaacattggtgtaattggattgacaggtagagccataactatcagagatggccatataggaagccttttaatttcttcctgttatgtcaggagccattgatttaaatgttaatgaaagtagaaagggcctaaacagaaaaaaagtcagcctcactagtgagggggaatgcaaattaaattgcagtgaaatgcaaatcaagctgaagtgagataccattttatacccactgtgagtggctactttttttttttctttgagacagggtcttgttctgtttcccaggctggagtgcagtggtgcgaacacagctcgctgcagcctctgaccttctgggctcaagccatcctcct

SEQ ID NO: 654 - DNA, 29445 bp, Homo sapiens
  source 1..29445: mol_type = genomic DNA
tctgcttcttgggttcaagagattctcctgcctcagcctccctagtaggtgggattacaggcacgcgccaccgtgcccggctaatttgtgtatttttagtagagacagggtttcaccatgttggccaggctggtctcgaactcctgaccttaggtgatccgcctgcctcagccttccaaagtggtgggattacaggcgtgagccaccgcgcccagccacacatttttattaatgaaaacggtatgaaaaagcaaactaaaagaactaatcaaaaataaaaagcttttgcagcttaccgaggaaaaaaacaaaaataaaaagcttgaatttaaaaattcagtccaaaggaggagatttttagaaggttccatactgaaatgaatatgcaagcatagtacatttctatgtttcaaattagcccatggagttggctatccctaatgtaatcactaaaagtatctagaagatctaaataaaggaatgatcatttcagagcgtatgctagaatgctgaagttataatagtccactagttacttaattctgcatttctgaagtgttgcacttgcaaacgattatcagtagtgtttttaattagaagagatgttgatgcaggtttatatgtatcaaaaacacatgacttcttagtcttaaaagtgactaagacttcttatttctgaaaacaaacccaaaaccggaactgagaatgaatattaacaaaataaacccacgaaaagtttttggtgttctctgccaaaaaaaaaaaaaaaaaaaattccctgtccagtacaatgcagttctaactagcttccttaaatagctaatattaaatgtcactcatcaactttcacaaaaagtgtttttgggagactctaaaatgcaccatcttaccttaaggatgttttaggagaagctccactacacaaggcagcaaaagttggaagcctggagtgcctaagcctgcttgtagccagtgatgcccaaattgagtgagtatgaaaacagtggcttcacattttatgttttcttggattaaactaatcagactcctgaagcttagttacatgtgcttttaaaaataatgcttgcgtaattgataatttagtgttaatcatttaaatgttaacttaggttgttggtgctatcgaataatactcagttcgagtaagtaaaaagtcagatcctgagcaatcagaggtgcaattttgttcattatgactgtattctacttcagtttcggttcaggaaaacccattctatagttcccattgactacctttgggtactcatacactgtattaaacatcagataattctaacattcattcagaactggaatgcccgctctatgctggattctgttagttgctgaggatacaatagtgaccaaaaatgcaatttccttatgcatcctttacctcttctgttctgcaaccaacatttgtatgagcccaaaattcccttgtaagatataaaaaaaaagacttaagttcaatgtttcatttcactccgtttttatcctgttttcagtttatgtaataagaacgggcaaacagctgaagatctcgcttggtcatgtggatttccagactgtgccaagtttcttacaacaattaaatgtatgcagacaataaaagcaagtgaacaccctgacaggaatgattgtgttgccgtgctcagacagaaacggagtctcggaagtgtagaaaataccagtgggaaaaggaagtgctggtaagtaactcagagctgctgcttttttcctcccgcagtgatctcttgtttgcatagcatttattattccatttaatactgacactcgtatttctagtagtattgtttcattctcattaacattttagtactggttatacttaccagagtctagagaccaaaaatgggactgcatggtggaagtttggggataaaactctttttaaaaaaaagtttttaatgttaacgtgtttttaaaaacagatgtcacgtgggttatgaagaagtctgaagaacgccttcatttcatgcaaatctataagctcctgcttttggctttaccatatgttgtgtctaatctccttctgagaaggacgaaaaactttcttccaagtgaagatccatttaagaacacatgtatttacatgcctataatatgctggttgtgtatgctttgtcttttaagttattaaaggaacgtctaaaaaatacattctccgtgcagtatttacaacctttgaaaaaggtcataatttaaatcgtcaaactagaaccaggatttaatgtgaaaaattaaactgattctttattcacaaatttataataccactctactgcagtctttgactccaagatattttaaatcatatttggtcgctgaggaagacataagttatagtatgcatccttgttccaaaaatctgggcccttccatccgcaccagccctggatagagaagacgggaaaggaaagccttttacaaagttacaagattatgtcatggaaatcgtgacatcaggctctgtcagcaggaccttggaataagactctaaatggctttatcattcaaggatttgaattcctactagcatagaaaagtaacgtatcttaccctttaaggtaggtttttgaacttttaattctatgtatgtaattcatcataaaaatcattaaaaaaaatttacctgtaactgttattccagataccacactttactgattctgagatgtatagttttaccacttgcaactgatagcatgtgacaattgaactagcaatctgtttttcttaatagtccataaaggactgtaagagaccattcagtggcatcttaggattgaagtactgtagtgagaaacctcagcttgccccctgcctggcactctgtgccctttcattttcaaattccaggtgttactcaattctacttcccatgtttcatgtcagtattaatcctttttgccagcagagaaaattactttcaagcaaaatctcatttagagtatgaaaatttctcagatttctcctagggccactgagttattttattaaagaagaaaacttaaaagccaataactggtctgtattatatgattcttaaatgctttgagaaatccttgcaaggaggctgagactctgaaaataccatgaagtgagtgacaagcagcggtctgactccctcctaataagatacacgttgtcaaaaaacaagataaaagtaaaaaatcctctaccagtcctaggtaatcccccactctccctaggtaaccagcattctattaatcatctcattttttcagcaaaactttctctattaatttaatgtcctaaaatctgttctcttaacagacagagaaaaaaggctcattctgttttaacctttttttgatccttttacacatgaaggccttgtccaggtaaccagatccagattttttaaaggagaaattggtagagagggtgtcagaatgggattgcatagggacatagtgcataggacatgcttctttcctgtgagatgaccagcatgggaacttcaaacaggaaagcaccacaagaaggcaaagaggtcaggcagagatggaactctcctctggcctcctgggttcctggagtcaagtgaatcaatagttttaatggcaggaccttggctgcacagtttcttgtgtatacaaatagagcaaggaggtttctgctgttgaaaagttctatagaaatagaactagcaaagatggagattgcaattctcagagaaagaaatcagggacaatcccttactctaattgttcagaaaccttacctagataatgccatgtagtgcagagccccttgagtcaaccagaaaagagaaatttgatgatgaaaataattaaggcttctccctgcctttaagaaaaaatcgaaatgcctggttcacaaagaccaccctttctgactgagcttggtgtgtccttccagcctcacctcttcgcctagctctggacgcactgatctacctgcagtgcggctttcactgtttctacaaggcaggggccaccacagcaccagcctcgtagaagcacctgagataccattttttttttctcgagagtcctttttgcactctccttctctgtcctaccctaaaggttttagctcccgaaaaacctcgtgtaatactagtgcttaggacagtgcctggcacttgttaggtactttaataaatactgaatggaatgaacaccttgctacagaacaagaatattgctactatattcagtaagatacatgcaccagtcaaaaaaccttttatagacttcaaattccaaatgctgtgaaagagaaaaggaaaaaaaaacacttaaaactgtaacaacacatttctatcctattagtgtttatacccttatcataaacaaaagacttcagtaaactgaggatataacagagttggactacacacattaaaaacttttttttgagctggaatttcactcctgttgcccaggctggggtgcaatggcgccatctcagctcactgcaacctctgcctcccgggttcaagtgattcccctgcctcagcctcccaaatagccaagattataggcgcccaccaccacacctggcttatttttgcatttttagtagagatggggtttcaccatgttggccaggctggtctcgaattcctgatctcaggtgatctgcccacctcagcctcccaaagtgctgggattacaggtgtgagccaccacgcctggcttaaaactctttaacatattaaaacattttatctttagtttatagtttaaaaggtggttatgtattctctgcaatttcaatgtatttggcagcgaatataaatgttacttaaaattcaagttaattatgttttacaatactttctcctaaagacttggtactgagttttcatatgtgagaattagttgcctatgaattaacaaatttttacctcctttatctgctattgtaagtaagaatactcttaaatatgtatcaacttcaaaccctttatagaatgagattaggttatatgtaaatgaattaaaattagtcaagcctccataatgtctagcatactgcttagctatcttttggttaattctaaaattttaaaagtttatatattctgctcatctattttaagacattgataaactttgatacatttgtttatgaaagctctaaaatctccaaaggaatatatttatgagtgtgtgtcctattattaattttaatagctgagaaagtttctataaacctaaattttgtcttttgcaatgtgctttgttcttgcacattccctatacagagacggctacttacaacagcctcagaaggcctccacacagggagatctctgccctcagcttattgtctttctgttaccagccagtttgtgatccttcatttctagcttctttgccttttgtctcaatttgtgttaaatggatacttaccttttccaaaataacttgcaggtcttcagcaccggtataatgtggatctagaatcagaaactttatctgccctgtaatctcattccatgcaactcctagtattgtgtgggccaaaactcctccccctatagaagaaaaaataggaaatacgaatgaaggcataaacaaatgtcaaatgcctattcaatttaaatagacagattacggccgggcgtggtggctcacacctgtaatcccagcactttgggaggtgggtggatcacgaggtcaggagatggagaccatcctggctaatgcagtgaaaccctgtctctactaaaaaaatacaaaaaaaatagctgggcttggtggcaggcgcctgtagtcccagctcctgctgaggcaggagaatggcatgaacctgggagacggagcttgcactgagccgagatcatgccaccgcactccagcctgggcgacacagcaagactctcaaaaaaaaaaacaaaaaaaaacaacattactttgcttattaactgatctaaaatagcattaaaatggactaccctacactataaaagacacaatgtcagatatactctgaaaggataaaattacatctttaacacaaaagatacaatcatatctataatcacatacaatttatattctacattcacatccatataattacctaaaatggatttagaaagggccataaactcctcccaacagagtaacaatctgctgtagtgcctctctcagcagatggtcctgctgcctctgagtacctccagtgatatagcactccattcattaagtttttttttttttttttttttttgagctagagtctcacgtcacccaggctggagtgcgatagcgtgacctcggctcactgcaacctctgccttccaggttcaagcaattctcctgcctcagcctcctgagtagctgagactacaggcgcacaccagcacacccagcgaattttttgtatttttttttagtagagacggggtttcactgttagccaggatggtctcgatctcctgacctcgtgatcgacccaccttggcctcccaaagtgctgggattacaggcgtgagccactgtgcccagtctttttttttgagacagagtcttgctctgctacccaggctggagtacagtgggcaatcccggctcactgcaacctccacctcacagctcaagcgattctcctgtttcagcatcccaagtagttgggattacaggtgtgtgccaccacacccagctaaattttgtatttttagtagagacagtgttttgccatgttggccaggctggtctcgaactcttggcctcaagtgatccgcccgcctcagcctcccaaagtgctggattacaggcatgagccactgtgcctggctagaaaatgtattttaaaacataagctcatacaatcaggagtcaggcgtgagctactgggcccggcctactcattaagttctttctgatattttgctgacatcagcctacctccatttcttttttttttttttttcttttgagacagtgtctcacttttgtaacccaggctggagagcagtggatctcttggctcactgcagcctcctgggctcaagcaatcctcccacctcagtctcctgaatagctggcactataggctcacactaccatgccagctaatttgtgtgtttttttttttttggtagagacgcggtctggcccatgctggtcttgaattcctggatgcaagctatcctcctgcctcagcctcccgaagtgctaggattacaggtgtgagccactatgcccagcttctacctccatttcttacacactagtctcaccttgccttctgtcatcacaggacaggtcttgttcttcaaagaattaagcatctttagatcagctaatccaatcttcttattttacaaataaaatccacagaggtaagtaattgcaaaatctcacaaagccagcccagttatgacagagtcatgacttacgaagctcagctgagtgaccgtttcctctttttaatactgttctcagctctttaaatgtttgaacatagctaccatttctcagcctttacttcttctggttattataatcttttttgtaacctttaagccaccttagaaatttttttcaatatccagagatccatacatatggtgtaaaagttaatttcaaaattttttaaatgactgattttatgcaacattaaatatttatatcaatgataagttttgcatattactcactctaccaaaaacagtgtctgaaacagcttaccgatcataactggagttccttcactttggaaatgattagccagttcccgtccttgagaggcaatttctgaaccttggctagaaagaaaccattttctatcagatgaactacttccaacactacggtcaaataatgagctaggagacaatgtttcctactttcttgttttttcgggtgttactgaaaaaatatataaatgtaaaaaaattaagtgttagggaactgagagcaattaaactgtgcaatttaaagcaacataaactcaaaatacttaaggccaccaagtgtgctagataagacgctaaaagaccttgattttctgcttcttgaactgtataaaggaggcctgggtttttaacatgaagttaaaacatcaccttggtgctcagggagttcttatggatggattaatcagaagaatgagtgttaagtcctgggttcttgccttcttgctggtagacttcttagtctgtatttcctcatctttaaattgggacccaaaacgctgacctgtctacataacagaggagagtctaggcctaaaatacatgtctgtgaaatcaatgtgaaaactgcaaaatgttttcaagtgcaacatactatttttagggaatctcagaatttttacttttgaaaagagaaagatagatgggataatgaagggaggtattttttgggggaaggtgcccggtggtgctaaaccttagctcttgcttaatgaggaacgtatgttttaatgtaccaaaactgtaacttttaaaaaaagttcttcactacttaagtctgtcattgttttatattattattattttttgagatggaggctcgctctgttgcccaggctggagtggagtggcgcgatctcagctcactgcaacctccgcctctcaggttcaagcgattctccttcctcagcctcctgagtagctgggattacagacgtgtgccaccatgcccggctcatttttatatttttagtagagacagggtttcaccatgttggccaggctggtgtcaaactgccaacctcaggtgatccacccaccttggcctcccaaagtgctgggattacaggcgtgagccactgtgcccagccagtctgtcatttttttaccactgatttccataaccactgaggaaaggataaaattacatctttaacacataaaagatacaatgaggacgatgttactgtaattaacaatagaaaatgtattttatttgttttttggcttttctttttttttttttttttttttagaaaatgtatttttctgttttttttttttgaaagggagtctcgctttgttgcctgtgctggagtgcagtggcatgatcttggctcactgcaacctccacctcctgggttcaagcgattctcctgcctcagcctcccaagtagctgggattacaggcatgcgccaccatacccagctaattttttttgtatttttagtagagacagggttttgctctgctggccaggctggtctcaaactcctgacctcaggggatccacccacctcggcctcccaaagtgctacgattacaggcgtgagccactgcacctggctagaaaatgtattttaaaacataagctcatacaatcaggagtcagctagttatggtcatagaaaataattaatttatattttctcattttaatattagaattatggttaagatcattggaaaagacaaaatgaatacattatttgaacacattactagattattaacgttttagaaagaaaaagagcaggaggtaaacaaaaaggtcagtcatagttcaacatttgagttttgccttttaagactttttaaaagattggagcataaagaaactgttaatataatttttatgactttactcaacgttaatatatttttaagttttcctcttctaggctaaaattaggcctaaataatacaagtatacattacatcacaaagtttattcataaaatcagagccttccaaaaaaaaatgaaaaaaaattaagattaaaaaatgagatttataaagcaatgagtaataaggaagaaggaaaaggaataaaaagaaataagggaagataccattttttctattattttaattaaaatgacagactgtcactttgaaatgatttatctaatttcttaaagtgtgcttacctgacaaacaggatttttgacgttataccgatcaattggtttagtaccagctgcacctcaatagatccaatccattgccgcgatccgacaaatgttgctggtttgtccccggcatcgactagagccttgatgtatttaaaaatataaaacatccatacacaagacagctattaaaaacgatgtttagggcattttccctgattaccagtacaagaatttttttttcttcaaaacagaaataagtctgcaccatgaggtaacaaaaattatcaatggtatattaagggctaatgaaacatacagttgattataatttaaaacggtatgttctgtacctgctgaatttctctgtgtgttggaatggacctctctgtgtatccctgatgtttgaaccaagagcagatagtctgcagagatcgataagcacagccccagccattgtcatctatgcgatcctgcatataatgatgatagccatatatgccctggaccacataaatctatatacagagaagaaacacagtaaaatattaacttaggatagaagtacatattctatatatgctcccgaattatgtttaatgttcttagagttagactgttactttagttccttataaaaatgccttcacagatctatggtttaacattataccttcttggctttttatttgaggttcaaagtccttaccacagggcccagcaggacctaccttctggcctcctctccaatttcatctcctaaacttttccctattgctccctctactttcggttcccatataccaggggcaatatgaccttggagcctcatggttctcttggcctggaactctcttttcccaaattaattgtacagcttgcactcttacttcactcaggtttccatttagatgtcaaaggtcttccttgaccatccagtctacaaacggcccactcattctctcactaccccaccccctgcctcacctgtcatctctgtcctctttatgtttttatttttcaaagtatatcatgacttgatatactttaaatgatacattacttatcatttaaaaaatatctgcctacttacactaatatgtgagctcagtgagtacatacactgtgtcttatccatttttgggcccaagcttctacaacacgcctggcacacggttaatataaatgctgctgaataaatgctgaatgaatgaaggaaggaataaaggaatgaacaaacaaatgaagggtccatatcatgggacacaggaagaatgtgtctaaatttataaacctgctatgattacagcccaagtatgttatttgatgacgctaagttaagggtcaaaaaataaagataaataaattactaatatcatataaattcttacttatagtgctaagaatgtatatgtctttttttattaaagaactgggtttttgtttttatttttttgagattgggtcacactatgttgctcaggttggtcttgaacttctaggctcaagtgatcctcctgcctcagcctcctgagtagctgggattacagttgcacaccaccatgcctggctccaaactgatgatatttttaaaaaattaagtgagaggagatagggacaagatagaaccaaccctcacccaacaattagagaatatatattctgcccaagcacagatagaaaaatttataacttgaccattgtgacaggctgaaaagtggctcccaaaaggtatgtatgtcctaatccctggaacttgtgaatgcaccctctgtgccaaaaagtaaaagaaaaaaggaaagcaaaggtattcatagacgtgattaaggatcttaagatggggaggttatcctggatcctagtgtgccctaaatgcaatcacatatattcttaaaagagaggggcataggaggagaaggtaatgtgactgaggaggcagagatcggaatgatggggccacaaaccaaaggatgctggcagccatcagattaaggaatggattctccccaagagcctatggagggaaggtggtcctgctgacattgtgatgtcagcccagtgatactactttcagaactccagaactgagacaatacatttttgtagttttaagccatcaaatatgttattattttttagggaacaaatacaagtttcaataaatttcagagttagtttcacttagaattctttctgaccaggaggcaagagtcagaaaccagttaaaacaagaagaaaaaaaaagcaaaaaagaaaaataaattctgacatatttggacattaacaaacacttctaaataatacatggacaaaagaaaaaccataatagaaaaatataaaaatacttagaagtgaacaaaactaaaatccttcaaattaaacctataagatacactaaaagcagtgctttgcttgaaatttaaaagcttacattagaaaataagaaagctgtccaggcacggtggctcatgcctgtaatcccagcactttgggaggccgagtgggtagatcacctaaagtcaggagttcgagaccagcctggccagcatgatgaaaccctgtctctactaaaaatacaaaaattagccaggcgtatggctattgccagtaatcctagctactggggaggctgaggcaggagaattgcctgaaccagggaggcagaggttgcagtgagctgagatcatgccactgcactctagcctgggcaaccgagcaagactccatctcaaaaaaaagaaagattaggccgggcgcagtggctcacgcctgtaatcccagcactttgggaggctgaggcaggcagatcacgaggtcaggagtttgagaccagcctggccaatacggtgaaaccccatctctactaaaaaatacaaaaatgagctaggcgtggtagcaccctcctgtaatcccagctacttgggaggctgagggaggataatcgctggaacccaggaggcggaggttgcagtgagccaagattgtgccactgcactccagcctgggcaacagagcaagactccatctcaaaaaaaaaaaaaaagaaagaaagaaatattagcaataagctaacatgtccaacttaagaagttagaagaaagacaataaatcaaagaaagagcaaaaaaaaagaaagtaaagagcaaaaattaataaaatcaaatacagaagttataatagagggggccaacaaagccaaaagtttttttttttttaaaagacacaaggcataaaaatgatatgaagaatgaaaaagaaaatattatgactacaagatatattaaaacctaggtaaataacttataaaaatcaaaaagtcctaaagctgttaccaaaactaaattggttactaaaaatcttctcacaaagaaaatgctacgccaaaattgttttacaggcaagttttaccaaatgaccaaggaaagatcataccactcttatataaacttctctaaaaaactaaaaaaggaacattaacctaactaatttagtaaaccagtatatcactaataaaaaaacaaaataagaacagtatgagagaagaaaattataagccagtatcattcacgaacatagatgcaaaaatcgtaaaatattagcaaatggaatccagaggggaataaaaaataatgagtcataaccaaaccgagtttatttcatgaatgcacatctatattgttgagagatttgtgccaaagtatttaagggtaaataatatatctataattttccttgaaatggttcagagggggaaaaaagagggagaaatgaagcagatatagcaaaatgttaacaactgttgcacatatgtatcgagaggtataggaatgttcattgtctaaacagcaaaaaaacttggaaaaaatcataaagataattaactatggttagacaaaataccagagatgtttgatatgtaatattgagtgaaaaagcaagctgcagagactacgtacagaatgataccatatttataaaactcagaactatgcaatactaaaagcgacattgctgagattgatatgtaacatatacgctgaaactactttttaaaaaggaaggaaatgatgaacacaaaacccataatagttcctcctggaactgtgtcgaggaggcagaggagtgggtagggaaagagcacagactggtaaagttttgcttcttaaattagggaggagctccctggtattcatttccccactgtgctttacaatttgcatatgttatatgtacatatcaaatattacatgataaatatgtaaagtatatatttttcttacgaccttgtaatacagatataatgaacctattttattgtcaaaaagcaatcagtactcattcaataccttctgtgtgtccaggttcttctaaggaactattctttttgtgaggaactttctatggaagctggttggcccacagcttttgcagatgatctgctgccctgagtacactctaatgaccaagaccacaagtgggcccctaactcatctagggtacgtactgtatcgtatatgcatttttttaattcttaagatttcctcaaaagtcctggacgctcagaaggtattaataaatgccaccatacgatagccaagttttctttctcttgggaatctgaactgagaggtgcagagttagccaggcagccaggagcaggaaatgcagttggaatgaggcatacactgggcagctgaggaagaacaggaaaaagtgacacacaagctgaaacagtgaggatacagagggtatgaggtggagcagacagagtaaaagttaagaacaggccagttaggatcacaagcatacacagaaagcaatagcaatgccaccaaggtatccacggagtccttgagagagactgaagacacctgctagtcacagggctgctgtttctaagaggcccagctctattggtattcctaatcttggatgccttataaggtcctttctcactggcctccatgtatccttaaagtaacccttccaccaccctccgccaattcactcttatttgagctacctttagggaggatctatccctggcaaccgggtatatgttacatggaaaataagtctagttcctcattagacttatcctacagtggctgggcatggtgaatcatgcctgtaatcccagcactttgggaggcctacatggcggatcacttgaggtcaggagttcacgaccagcctggccaacatggtgaaatcctgtctctactaaaaatacaaaaactagccaggtgtggtggcaggtgcctgtaaccctagctactggccaacatggtgaaaccctgtctctactaaaaatacaaaaattagccaggtgtggtggcaggtgcctgtaaccccagctgctcaggagactgaggcaggagaattgcttgaacccaggaggcggaggttgcagtgagctgagatcacaccattgcactacagcctgagtgacagagcgagactctgtctcaaaaaaacaaaaaaagatttatcctacagtgtggtttgggtagactatgcccttaattagcatgatttctcaggttcagaatgaaaaaaaatgggacaagcctttaaagaaataagagaattttagtaagataaatgtggtatatctacctattactaacttttctagaccatttttaattactgctatcttaagcaatgtctgttaacagagatgggtgataaatcatgttttaggaatgaatacataatgaatcaagtctcctactgggtaccaacaaaaaacaactaataacattactgatccagtgactcccataaataattagttaaactcaccataccagtctccatgttaggtggattaaggtaagtatgtggatttctaatgtaaccatctttgtatggctcatctggaaagtgataagcattagaccttttgaaatagggtctgtcgtgaggcagattgaaaagatcatgtaactcctaaaataaatcagaatcaacagaaaaagaaaaaatgttggtgatttagattcctagtcaataaataaagatgttattaaacatggaaaattatatataggttataaaagtttccaaacacttatggtttaattcactaacatcaaagatggtgaaaactgaactaaaaccaagtaagatttattttcgtttacgtctgtatctgggtagaaactggaagggaacagagaaaaatgaatataaattgttagagtaagagaactaatttttaaataattatttattacaacatagtctgttaaaatacatccaggctaaagactggttttgaaatagccttgtaaatgagtaaattataattaacaataattatatcaaagtattttgcaaaattgtgtcgagtgccttacaaatattttatattgtaagtggtagtgattaaactacagagtagaagttagtggtctaaagccaaccaatatggcaggaaaacaaatacacatatatgtttaaaatgtgttattttcccaactatataaaaacatgtaataggtattttaaaaagtttgacatgttctttatcatatcttgtactccagtggttttaaaagatcagctcctgtagctattgcttctacaaaccaagtcacctccacatacagagggtcagggtattctcgctctccctaaggacagaaattaggaagatgctccacggtctaatttgataggttctaagcgagtccacatatcaaaaagatgcactccaaaaccagtcatgagtaaatctcattactttgaatgctggtcatgttttctccaaaattcctctaataaagcccaaataaccttacttgtggagtattaccataaatcctattcagaattagcataagttatcattttccttccctaactgtaatcttgtctctttcacaaatcggaaagttatagaaatctgttaataccagcaactttaggcatgtaagcaccatttctatatttcattatggaaaaatattaaaatttcacagaatatatgaaccacaccgagcatttaaaattaaaatgttacatataggttcaacataacattttgtcattaatactacttaaagtttcatgagaacagaaattaaataatgtgtaaaatgaatagtctaaattccacacttttaagttaaatcacaaaataccttccatttagtggaaatatataattaaatacaaaatgaatgatagtcattattgttttttctaagaatagatgaactggttttaccttcctataggcctgcagctggccatctggtattcctgaaggatatgaaattgttacaagattttttttccctggtaataaaaagtgcagtggttcagggaccacaatagatgttcctttcatatatttcaaaatacatttttccatgtcagttagttgattatgaattgcatcaaccaggagtttacgaactctgtggggggaaatatataagtgtattaacaaaagttatagtgactacaataaagaaaagtacagagctaatatatccttagtatagtaaaaaacttgattggaccaggtttgctaaaggaagtctgaattatacattataaaagaaactgtgtatttgctctttgtggataaagggaaatcctccaggttttagcatgctaccctacttcctccaaataaccatttaattaatagatggctcttaggttaataataaacaaggagaaaatcacaccttaggtatacctacaggatatacaaacatgggtttggggaagggccctcattcaaatgtggcagtggtactataaaaatacttactttccccatgtttcttctggagcaacagatataactgcatcgacaggtaaagtcatattaacataatggtgtcctccgctttccctttcaatgatgggcgttacagctgccagggaggttgacatttccagcataagatctatatttactatttgatgctatatagataaacagtaatagtcaacttgtagtgcattaaacactaaatataaagagtaagtaaaaagacttttcaaaaatgtatttattattaagaaaaaaatttaagactagccaagtacagtagtgaaaagggggaaagagtagagaacaaggagttcaatctgtaactggctgtgaatgatcaactgagataactcactaccctcagaccagccagtagaaggacttttaaaggacagaatataaagctgtactacagtaaaaagattaaaagcacaaatattattttaaaaagaaattattttctgcttcaaaataacatggggagagggattaagaagtaaagatgaaatcagactggccatgaataaacgttaaagccacgcataggttcactggggttcgttacatgattctctccacttttgtactgatttaaaatgtttagaaaatcaaattaacataaaataaccacacaccaaaggaacttttaaacatataactatatacccctggtctaatacataaataactataatcaaatactgaactctactttgtaggtttgatttttacaggggtatgaacaattgtgaaatttacactaaacttatttcgcaaaatactgaggatcctgggagtcagacttctcactgggaaaaggtcaagcactctagggttgaagtggaactggaggtatcaatgtgatttacacagataaaaatgaacgtgttatgtgtgtgtgtggatagtataaaagtataaaagtgtgtgcccatggaaaaatgactgattctccagctagaacagagaaagcacatgttgcacctggaacatctgatgggtaggaagtgcccaaaattacaatgttagaaaggcactggagccagcttgaagaaacttctattggccaaatcttggaaaatgtgagcatcaaaataactaatgatagtaccagattataaaccactgcataaaataagcatctatggcagataatacaaaaggaaatgacagatttagaaaaatcaccactttgtaatcaccagattaatattggattctggcagaaattatcaatggatgctaaaagtggtgggtcaaaatctgatgaggactaaagtaagatacatatgtagtttcttcccacaagatactaattataagggaaaaaatagtacctttaccatggagaaaactggtggataccatcttaagtaagtgaagttaacctcaccaataatagcaacagactgataactgtctctttcataccatgtgctgaggacacaacatcacttctgtggtattcctgccaatagtgcatgacctaactctaataacaaggaagcataaaacaaatccaaaaggagggacagtcttaaaaagaactcacctgtacccctcaaaatgtcaagctccaattactggtaattttcaaatcattgtatccagcccacaattattttatgcattctacatctgtaaatctaacagctcatctgtacatcttactgaggtcttaaacatggcccaaaccaacttcatgtcctcctcaccttccatctttacccacacaagaaactgatcttgccagttagtttccaagcagaatccattgtatccctaaatatctcttgtatgcaatccctcttctctatttccatagctagtggtttagttaggcctcttctaaagaggcccacgcccacctctccagccttatgtccacccattcttcctctaccagcctggaaacactgtcgtcacattaacttcatacaacttcgtgccttgaagacgcatctccattttctatcttcaatatctgttaaagtttgtggcacatggcaggtactcagtaatatcagttcaaaaatcaacagaaccagccgggcgcggtggctcacacctgtaatcccagcactttgggagcctgaggcaggtggatcgcccgaggtcaggagtttgagaccagcgtggccaacctggtaaaatcccatctctactaaaaatacaaaaattagctgggcatggtggcaggtgcctgtaatcccagctactcaggaggccgaggcaggagaatcacttgaacccgggaggcggaagttgcagtgagccgagatcgtgccactgcactccagcctgggtaaaaagagtgaaactccatctcaaaacacacacacacacacacacaaacaacagaaccaagagtagtgtgaagaaaaataaatcatttactatttgtcttatgtggcacaatgtgtcactttgtcatgattcagaatgcgatttaatttaagtaatttataaatgtatttaggctgttttatttttgtgggagcaaagaaagcattataaaaaaacccttttgagattatgtattataatcagacaaaaacttagataagtaagacaaacatataacttttggcaagtcatttaatctttttggacatcaatattctgacctatgataagagggttaaattatttctaagattgcactcagttccaaatccaaagatttaacatttttatcagtacagaagacagatagtttgcttaccatgtctgataactttttgtccttctttctcatgaattttctttttatatcttcttctggctcaaatctaaatttttaatacacagacatttataatatgaaatgatgttttgaaaacatttctagaaatcttcaaacatactcactgaataaagcgcagtatgttcttacaagcagaagcatcagtcagttctccaggaatggtgtttatgtcactgctaggccatatatacactgaactgtggcaaattctgaacacaagggcgtttgaagacagcttagttgacaggtcactcaacacatgtttcagtgccttcttgagaaaaatttctaaattaaaagaatataaatagaagttaagaaaaacaaatttttcaacatgaatggttccaaacatacacaaaagtagagcatagtaaaactctcaatacctattccccatattcaataataatttcaaaattttttgcctatctttttaaaaaagtctgtgagacaaaattcacagaccatcaaattcattcttttaaagcaaacaatttagggcttttagtatattcataaggtttcataatgatcactaattctagaacattttcatcactccaaaaagaaaccctgtacctaccagcagtcgtttctcattccccctacttttctctaattgaaaattttctgatttacctcctacatcttttcttttttttttgagatggagtctcgctctgtcgcccaggctggagtgcagtggcgcgatctgggctcactgcaagctccgcctcccgggttcacgccattctcctgcctcagcctcccgagtagctgggactacaggtgcccgccaccacacctggctaatttttgtatttttagtagagacggggtttcaccacgttagccaggatggtctcgatctcctgacctcgtgatccacccgcctcggcctcccaaagtgctgggattacaggcatgagccaccgcgcctggccctcctacatcttttctaatttgcacatggtaccccatggcctggtgggggtgctggaacacaatatccaagtttaaatcccattcaatccacttactaactatatgatctcacagtttttatctctcatccagcttcctttgcaaaatgaaaagaatttcagcatactacccatggcaattattaacctacttttttctttatggatttgcctgctgtggacatttcacataagtggaatcacacattacatggctttttgtgtctggcttctttcacttagcttaatgtttcttctgtattgtagcatgaatcagtacttcattcctttttatggcaggataatattccattgtgtggatacaccaattttgttattcattcataaattgatgcacatttgtttccactttttggctatcatatatatgctgccatgaacatctgtgcataagttcagtttctgtgtggatgtgttttcaattctcttgggtgatcacctagaatagaatttctgaatcacatggcaactctctatttcacactttcaggaactgccaagctgttttcagcagccgcaccattttatattcccatcagtaatctataaggattccaattactattaaaataatgtattacttatagcaataaaactattgagtgaaatttaaacctcttagttctttttctctttggactatatcccactaggcctatataatcaaagctctgtgttctaaagtcacggttggtttttttttcctctgtatggttatgtcaccaacatatttgctttagtttgtttttgttttcaaggatttccttttaatagactttttaaaaaatatgtttgaatattcaaaaaattagagtattttaatatttttgaatatttgacacattcaatttggaaacatttttacgtttccaaagtcaaaacaatataagaagatatagtcaaagaagacaatctttcaatactcatcttagccttacattcctaaatcctaagcctatttaaccttgtaaatatttattcaatgacctgattctgctgaaagagtatttaaaaaataaataaataaacaacgaccatactggtatcttgataaataaatactttggagctattgtagagattactcataacaaatcagatattaaaatattttgatatgtttcagaaagcagaatttaaagattttcagttgcactacaaaagacaaacataattcttaaattagcttctgtttatccctaaaggactatttggtaaagttacctaaaaaaaactgtgaagcctttaaagttaagcatgtccattctctatattttctgattaatgagaagccctttgttgagtgttgacagagtttgataaaggagaaggaatacaatcaagtcagaagacaagttcaaatatattaattactaggtaaaaagtatctgtagtccttgtttacatttgattattggattatctactgattaatggattaattctactttggaataagattatagtaaagtatgttttcagtttatatcaagttgtgaaatgtaaggttttatccataaagtaacattttaggaacagctacactctactaataacataggcctgaaaatgagtgatttagtcctagtaaaatggttctcatcttaatggcacattagaattacctagaaagctgactgatgcctgggtctctgtcccagaaatgtagtttaatgtagtctggtggcagggattcaaatgtggaccaaaactgagaacaatttattagttgaagggatgggtggaaaagaatattctgcaccctctccctcccttccacggggctagtaaaggatggccagctgcaatctccttcaaggaatgctggtatctgatatagttttgatgtctgtcccctccaaatttcatgttgaaatgtgatctccaatgtttgaagtggggcctggtgggaggtgtttgaatcatgatccctcatgaatggcttggtgccatcctcacagtaataagagtgagttctcactcctatcagttcacaaaagagctgattctttaaaagagcctggcacctcctcctctcttttgctccttcttttgccatgtgatacactgccccctcctttgccttccaccatgattgaaagtttcctgagcctcaccagcagcagatgctggcaccatgctttttgtacagtctgcagaactgtgagccaaatcaacctcttctttataaatgacccagtctcaggtattcctttagaaagatgcaaaacagactaatacagtacttttaattcctgatctttctgaacggctctgtggcttctggcaccactactcgtacttttcatgagtgatttcatttataatgagggtgttaactatcacccttcagagacattacattctctagctccaactctgaccacactcttctaaatttctgactcagccaaatgcctgttgggaatttgtacttgaccttccactggcatcaaatgaaacaaatctcaaacacagctcatcccattcctcctctgatgttctttatctcagtttgtggctgtagttcaagtcagcaacaggaagacatcctagaatctgcttcatataaaccctgttgatttttcttccatagagttcttgtactcatccccatataatgtagtatttaagagagtaggttctggagactcaggattgtacatacacttgcaagtctgtcatgtacaattctcgacgcacatttacaacgtgctcattgtggatatttacatttattgtaacaattaatgaagaggggagtaaagtctcttaagaaagggaacatctttttctaatttgcacagaggtgcgccatgggctggtgggtgtgctggaacacagtgtctaagtgtaagtcccatttaatgtacttactaacaatataatcttagttcatcctatctctctctcagtttcatttgcaaagtggaaataatctcagtatatttcactatcaattttctaataaaaaagaatttttcagaagacctaccattaggagtagctagctgaaaagccaaatcaaggcctcctcttattctgaagagtatatccatactttctgaaatcacctagaacaaataaagataaagacaaactcccttgtaaaacaaaacaaactcatattcatataaattagaatctaagtttagtgttaagacattaattaaccttgattcttcaaattatttcatgagttaattccttgttttatagaaaaaacaaaaacaaaagcaaccccaaaattttaaatcaggggttctcaacctttgttctatactgaaatcacctggggagcttgaaatactgaggcctgggctgtacccccagagattctgattaactggtctaaggcctaggcacagggattttggttttttgtttggagacagggtctcactctgtcacacagctggagtgcagtggcacaatctcagctcactgcaacctccgcctcctgggtgtaagagattctcctgcctcagcctcccatgtagctgagattacaggcatacaccaccacgcctggctaatttttgtatttttagtaaggacgggatctcagaatattggccaggctggtcttgaactcctggcctcaagtgatccgcctgtctcggcctcccaaagtgctgggattgcaggcgtgagccaccgcgcccagctggcacagggatatttaaaagtatcctatgcccccatgccagtgattctaatgtgaatggttgagaactactgctttaagacaatctttccaaattataatcttgacaggtttaacaatgacaataaaacatcaacagtaaagaactagtttaagaatgtgacaaggcactgaacctaatataataccagggagtcaagacaatgagaggaaactcatactgagggtgggatatcaactggtggaatccttcagagaatatggcagtaagaatcaaaggtttatattcataggcttgatctagtgatatgcatttagaatctcagacttagtctaagaaaaatctgaaaaacacacaaagattcgggtacatggatattaacctaactgccaacaatagattggttaaaaaaaataggaatatcatatagccataaaaaaatcatgtttttgctgaaaattaaaaggcacaggacaatgcttacaacttataaagggaaaagagcacttgcaaaatggaactaatcagttctttacttggatccatatactgtttcaggtagttgatgatatatcacaaatgacatgtatcattgtttgtgtacacatatatacacacacagatacacatattcatacatatatacatacatatatacacacacacacacacgagagaaagagacaggaagggagaaagagagcgggagatttcttttgggaagaggtttcaaaaatttcatgagactctcaaaacatatctctcaaacaggctgaagaaccatagtacacactaagacccctattttgaaataaatgaataagtactaacatttactgagctcttcaaatgtaaaacacaggcagggtgcagtggctcacgcctgtaatcccaacactttgggaggcagaggcaggaggatcactttgagcccaggagttagagaccagactgggcaacataggaagacccccatctctaccaaaaaaaaaaaaaaaaattagctgagtgtggtggtctgcacctgtagtccagctactcgggaggttaaggtgggaggactgcttgggccggggaggtcaatgctacagtgagccatgatcacaccactgcactccagcctaagcaacagagcaagatcttgtctccaaaaaacaaaataaaataaaacaaaaacatgtaaaaggcactatgctaaacatacatacttactccaatcctcagaacagtattaaataggtaccaatacagtttttctcattttacaaatcctttgtcacatttctataagggtcactgtttttatttattctaaaattgtaatcttttgaaagatcatataccctttgtcccaattctacttctgagaatttattctaaggaaacaatcaagaaagttcaggacaaatttagcttcatgttgtccatttattctaccgttgttcatcacagaaaaataaatggaaaccacttaaatagctattaataagaaatcagttaaataaagaatactaccaaacaaactagtatgtacccatttaaataaaaaatatttaaagatactgaagataaaagttagacaggaaagaacaaattttaactctgctacttactgtacaattttacacaatttaacttatcacttaagtctgtttctcttctgtaaaactggaaaaatacacaacttcccagggttgttatgaagattccacaagacatcattcataaaagcactagtcttcctagacttccgaattagctgagatactctctgaagaaataatactgaggctgagatctgaagggtgagtgaaggtgcaatagcccattccaggcagggccatcgatgagtgaagatctgcttaaaagaccacttaggtgactaccccagatggatagatctcaaggccaaggatggtaagagtggcgacagtgacaacagacagacatttagaagtagcatctataggacttgattattgactgcatgtcggggagttgagaagagggagatgtcaaggatgatttccaggttttgggcaggcacaacaggatgtatggtggtgccatctacagagttgggggttcctggaggaagagcaggtgtgggctgtggggaagtggaaatgctcagtttggaacttgctgagcttgaaatacatatgagctatccaagtggaggcacggttagcagatttgtgggtctggagctcagaagaaaggtctaacttagagataaaattttaggagaacgcatagggtgtaaagcgtccctgaagagcaccaccatttaggatagggattggagaaccttgctgagcaatgagacaggagagaaaccaggggagggaaataccacgggaactaggggaatataatatccgaagaaagttgcgcctgtcccaggttaagcccttcttgcaaggcttcaaaaacgccgaagtctctcaaaatactttcacacagagaagtagcagggggtgcgtgtccaaggtggccgaggcggggtgcacacttgtgtagggcactttccccccggcccagcgcggagacaggcgaactggagagccgccctgcccacgcagctcgcagctgccatcttggaccccggcaggaccagctcctttcaggcgctgtgaagcccgctcgtggcggctgccaaagtccggggaaaaacacaggggtcggtgacgagcagagatactcaccatgtccgcgacgtggcggtgacacgggcgctgacgcctgcccaaaagttccgggggccggccctgaagtggtgtcaccgcacggcccaggggcggggcccgggcggaccaactacaactcccgacatgctcggcggcatgacgtcacggagcgtaccacaccgcagtccctcgcggacggcgaggcggggcgggtagccgaagacttatgtttggtaaattctattagttaagtcttttctgtcctacagaagctcacacatccttctgtgtgttcttcgatgcggattcgaatctcctcgtatcctcccacagcgtgcttggaatggattctcccgtacccggggcaacacatcacacaataaacgccagctgtggtggaacgtgcagaggcgctgcgcagcccaggcgtgtcgcgcgcttgggaaccctcgccgctcccgcagcgcagttaacgtggacaagctggggcaacctggacgagctggggcaacctgatctcggctgtcggagtgggtgtcctcaagaaaggtgacttggtcctcgcggacgccaggtgttgccccttagatacctgccacctcccagcctccgtttcctctctgggaaacagactcctcatcacctcctccagttttctgccccttcttcacctctcctgacgctccatccgtaccttttgcaagggaacgtgccataattcggctatgctctattttcttgtctaatagattgtaagctccttgcgggcagcatctatgccttcttaaatctgtttctagtttctaccagcaagcttgccccgaaggggattgcagaatatctgttaaataagtgaatgaataattttgtaaatgttgctcaataagagttaagtagtggcgggccgggcgcggtggctgacgcctgtaatcccagcactttgggaggccaaggcagacgcatcacctgcgctcacgagttcgaggccagcctgggcaaaatggtgaaacccctgtctctactaaaaataccaaaaaaaaaaaaaaaaaaaaaaaaaaaaaaaaaaaatagccgggcatggtggcgggtgcttgtagtcccagctactcgggaggctgagacaggagaatcgcttgaacccgggaggcggaggctgcagagagccaagacagctccactgcactcctagcctgggcaacagagagagactccgtctcaaaaaaaaaaaaaaattaataagaaaaaagttaagtgatgggaaagttctaggcaagaatttcttccctccctcctccctggctcgcttgtgtgccgggagctgcgcagatgcggggataccgtgagagggaggaacctgtctcagctcctgcccttgtgccgtggagctttgaaatataaggtaaatgaaagtactaaatcttgactgaagtttggttttaaagcatctctgattaatggaagaggtaggatgtggggaagggcgttgtatttagttatgtttcagtttaaaatgaatcttcacttgcccctttggtgttacgtattagcaatgattcatgctcaggtgagccagtttcaggcaggcttgcagagaggcactcaaacagcttgctttaaatttaaggtaaaaggccgggc

SEQ ID NO: 655 - DNA, 55655 bp, Homo sapiens
  source 1..55655: mol_type = genomic DNA
aacgcgcccggcccttggcctgatcattgtaaagcctgcttccactttcccatctcctttgactttgaccttttgtatccctttttcacttattaggaccttttaaggacattgtgcccacctggatcacccaggagacgctccccaactcaaaatcattaactgaatcacacctgcaaagttgcaaagtccttttagctgtgtaaggcactgtattcacagatcctgggggcgaggacgtgggggtctagagacgcatatcttcgggggccatgatctgtctcctatattagggacatagcagaagtcccactgaccagatagaggagacttaatagagtgacgaagaaactgtaaaaagctaagtgggaactcaacatttttctgctcacagctctcaagggaaagaccaaagtcctccccggtggccttcaaggtattatatatcacccctctgacctcaactccccctcccctttgctcagtgggccccaaccacaccagccccttcctgctccctggacacctctaagccttttccggcctctgggtttgactttccctcctagacccatctgtccttggagtctcatctccgattccagctcaaatgtcatcttctctgagaggcccaccgcagtggccccagtgagagagtatcctctctccccgcctcccaccacatggctgctggtcactctcctataaggaatcatctgaaattatctgctttagttattcatttcttgcctgtctcccccagataggaattttccctccctgagaccaccaactgggtctgccatgtacaccgctgggttctgcagctctgagcaacctgtccggctgctttgtaggtgcccagcacaggtcactcctgtgcccgccaggactggtcagagtggaacagacagggcggagggggcagggcagccctgcccgcctggacagcctggagaaggcgggaaaacgaggcgggaaaagacagcaaacaagccctgcgggtgggtagagtggggagccctggcaggccctgacgccaggcagtggggcttggggcgatcgggcgagccatcagggtgcaggtggtctcctaggggccccccacattccctcgcagtatttacacattgattccggccttcttagacctactggtcaatgcgtgcgagtggggggctgcgaacggacttggacttaagagttcagggggtctgtaccctgggggtccccaaggctcctggggtgtccacgtgcggggggtgaccaggccctgccacgcagcccctttgcacgctgggcgcgcccagcagagcgcgcagggctgggcggagccgtggcccactaggcggaggcgccgtggacagaggcgggggcgccccccaccctctttctcgcttcccgccactgcgtcggccaatcaggaggcaggcgcccgcccccggcacggcctcctgcggccccgcaactcccaaatgccgagttttcgcgggaaaaaaatcagagcagctggcagcgcggcgggcagcgtttgccgagcgggcgctccgggtcgcacgcaagtccgcgcggggtccgggccacgcacgcggtttcatcgccatccccagccgggccacgcgcgcaggcagacaagctgttcgcggcgaccggagaggtgagcgggcgggccgggtcggggtgccagcccgggccgggcgcacggggctcgggaactttgcaaaactttcccgcgcggccagcccgggcgcacgcatgtcccgcactctgtcccgggatccagggcctccccttccacctaaccctcgggaatcgttccccggcacacatccggctggagccgggaccagcgctgcgtccccggagcccggcggggggtcgagcgcgccgggtgggggagggcctggcgagccgccggggaggatgtcaggctccgcgcctgcgcgcggggcgccccgcgattcaattgtcgcgcccgagcccgatttcgcgcgccctgagttccccgggagcatctgggccaatggggagcgagcggggcggggcggccgggtgctgcggagccaataagaggcggctcaagtgaaggggggcgggacttgacgagcgggggccccctctgtagtcccggcggcgggggtgggcgtgggctcgctggcgcgacccgcgcgggccagtgggagtgcgggagggacgccgagggtccagggtttggaggggcgcgagctgccgggggttggaggtcgaggtgagtcgcggggcgcgcgcgctcgcgggtggccgggacggggcggccggttaccatggccaccgcggggcgggcccggtcgcgcacgcgcgcggggggggccggcaaggagggggggcgtgggcaccgaggggtcccggggtccgcggatctcgggtggggtttttccctctcagtggcacttggttgagttcccccgggacttctgaagttccggcccgcgctggacttctgggattccctcttccgtaaataggaatccgaggaatgaatgaatcaatgaatgaatgaataaacgaaccaactcggccacttggcccgggcctcctttctcctctggtcgtggggaaggagggatgggttggaccttctgcttttctttcaattccctcttttcattctccttcctcctcaatcttcaacacttggctagtcgttaatgccttaagtgcttaatttgttgtgtctggtcctggccagggtctggctgtacaggaggactggaagggcatcctgggagtttcctggtgtccacaggccggacaaaagcaaccccgactccttagagcatggcatggctcagaggtgctggtaaaactgatgggggtttttgctgtccctcccctcagcgccgacaccatgtggatccaggttcggaccatggacgggaggcagacccacacggtggactcgctgtccaggctgaccaaggtggaggagctgaggcggaagatccaggagctgttccacgtggagccaggcctgcagaggctgttctacaggggcaaacaggtacacccgccgccagcacctttgttctatgcctggtccaggcctcgcgcctctgcagccaccagccgatactttctccctcccacctccccccccaacaacctcgtccggtcccacttcatctctcccggaaggagaagtccacagaaacctcaaatgcctgcgagaggaaggaacaaagggaggactcacagattgacacgctgggctggcggctggccctcgaatctatagggtctgggcttttaaacttcttttttcaaagctccgcctcaaaataatggctagagaaagaagttttggaggtggccgatggaaggctgaggaattttcgagaaagggcccaggaccatctggtagctaggacggaggggaccaggttttcttttttaaacatccaccaccaattgctctcagcctgtaccggttaagcatcagaccctgcgagtgtttgtttctaaaaatttggattagcttattcagagtctggagatggcgcttgctaatcaggaatttccgccaccctgagcctgctgtgctgcggctgctgctgacctggggcgtgtggtccccgaggggtccaccgaccctcgtctctttctctgttctgtctccagcccctcgttgcatttaaaatgtccccctttgatttcatagctgccacgtttggggcgctccctccattggcacctgggggtggaggtgctactttggttggtgtttttgtgggggactgtgggacctactgggagtggggtttcccggcaggatgagacagtgtgatcgaaggtgtaggtcccatctgctggagttggttggaccgtggggacgggcgtagactactggaactggattaaaagtcgtcagttgagctgcgtgtaccccactgtgttgttgttggattttgaaccgggtactgctgccatctggtgtctaggttggaaaataaacactgcgcccggccaggggtttttgggggctgggaggatcatgcctgctcactccagatgagacctgatgattaatttctctggcttgcatgccataggagaccttcattagccctcttcccgtaagagacgtgatgacttgagtcttaagaatctgagttaacccgccctgccccgggaggaggcgatctggagaacttggggagttgacggtgcaagccgcgtgtgtgcagagaagaggcagggccgggctcgacagaggagctccgcctggcgctctcttcctccctcctcctatgatgcgtgctccctttgtggcatccaaactgattttgatttgccactcagcctattgggtcagcacagaaggcttcatttcacaaagagtttctgaagcctgcaaggaccttctaagttcacagcgtaggtcagtggcgggttggactctcatgctcccaagttcaggagaggagataatgctgagtatccactctatgccagccaccgagctagcattttaacttttgcatttcaaccatgcaggaatgggaaaacacctagacacacctgccatgtagatttcaccatcggtattctgacttattaggtttatcttgaagcgctctgtctttctctctgcccgccaatccatctttttgggatgcatttcaaagtaagttgcagacaccagtccacctttcccttattactgcagcacaccgtcagtacctagagctcagtatttgtttttggttctgttttcattgattttttttgttgttgttcctatttgagacaggatctcactctgcccaggctgtgttgcagtggcacgatcacagctcactatagcctcagcttcctgggctcaagcaatcctccagcctcagcctcccaagtagctaggactataggcatgcaccaccatgcctggctagtttttgtatcttttgtagagatggggtcttattatattgcccagggtggtctcctgggctcaagtgaccctcctgccttggcctctcaaagttttggggttacaggcgtgagctacagtgccggacctaaaagctttgtctatagtgaaacagatgttagacagactgaataattttgacaaatgtctacatccatgcaacccaaaacccctatctcccctcatttgtaacataatacttgagtcatacaatagtgtctgtcacatttctaagtttagtgtgacaatgacaggaacacgtatgttaattagacatgtacattgtgcttttttttttttttttttgagatggagtttcattcttgttgcccaggctggagtgcagtggctcgatctgggctcactgcaaccttcatctcccaagttcaagcgatcctcctgccttagcctcccaagtagctgggattacagtcacccaccaccacgcctgattaattttttgtatttttagtagagacggagtttcaccatgttggccaggctggtcttgaactcctgacctcaggtgatccacctacctccgtctcccaaagtgctgggattacaggtgtgaaccactgcacccagccacgtacattgtgcttttaattgtcaggatgtccgcagtgatgacacctggccctagccttgccggaactcacccggactgaacagggagctgggattggaacctgggattttggtttctgagactgggctctcaacactgaatttcgtctcccaggtcagctctggtagttatgaaaagattcagtgttcctgtgtaaccttcataaccgcctcttagttcccttaccctgtggctgtttcccatgcagtagcttttttttttttttttttttttggagacagtttcgctcttattgcccaaggtggagtgcaattgcgtgatctcggcttacctcaacctccacctcctgggttccagcgattcttctgcctcagcctcccgagtagctgggattacaggtgtgcgccaccatgcgcagctaattttttttgtatttttagtagagatggggtttctccatgttggtcaggctggtctcgaactcccgacctcaggtgattcacacccccctcccccaccttggcctcccaaagtgctgggattagaggtgtgaaccgtcgcatccggcccccatgcagtagcttttaagagatcgtgtcgttgcttctgtcttccgggccacagagaggtgatgcagtttccccacttgcatggctgggaaagtgagctggcagcagggaggtttggacagtggcgggaaggcgggacagaggcacacagcagcacctcccagagcgtgaagtctgcaggcacccaggctaacgtgatagaaagcaacacagttcccggtgggcacaaatgggcagttgtccttatagaatgttctagagtgttcacagtctttttttttccctgtttaaagaaacctggcctagcagcccaaggtctgcagtgaagttgatggagaccccagagcagaacagagttgggtctgtctcggaatatggaggatctcgtggtggtctcacttgggctgaatagggtgacagtgatgtcacttgatgggcgggaacgcagggagctgatcgagggcagtgactttgggcagacggcccagcctaggcaacgggagaggcatctgcggcccccacccctcaatcttttttttttttttggctgcacatcaaaataacaatagctgtcttttgcggcacctttaacctgctcgggtacaacgctctgcactgtacataatcttttcagcatccctggcccgcgactcgccagctcccacatcatcttattttagatagggctaatacccaccacgctgcagcgcagtgcgaattcaatgaggttgtggatttgaagggcggagtgagccctgtgccaggctcacaatgaaagcgaaatcaatctcttagcacagggcctgtcccgctctgcactgtggatgtttggggccaggtcatcctctggctgggaccgtcctgggcactgcagggtgcggagcagcgtccctggcctccacccactccatgccagagcatcctgccctaccagtcatgacaaccacaaatattcccagagacttccatgcctcaaaggcaggattaaggtcagtctgatgcctcagttgaaatggtggcccaggaatggccttgcaagagtcacttgtcacagtgatgcctcaggtgtccccactggacggcccccttgcagagacctgcccttctgtctgcgggagggagggtccccaccaccagctcccacccactgcggcatccctcccccaggatggctccctggtagagggcgcggcctctgttagggtgactcaccactgctgttgtggccccgaagcagctgtagacaatctgtaaaccggtgggcgtggctttgttccaataaaacttgatttataaaaacaggtatggcggggcccagtggctcatgattgtaatcccggtgctttgggaggccaaggcaggcggatcacctgaggtcaggagttctagaacagcgtgccaacatggtgaaaccccgtctctactaaaaatacaaaaattagccagacgtggtggcgcatgtctgtagttccacttaggaggctgaggcaggagaatcgcttgaacctgggaggtgggaggttgcagtgagctgagatcccaccactgcactccagcctgggcgacagagcaagactccgtctcaaaaaaaaagcaaaacaaaaaacaaaaccaaaacaaaagaggtgcaggccagaattgtccccgtggacatagttggtcaattagattgcatactttaatccagcctcagttggtgtgtctgggttttctggctaggaagaatgctgctgtggaatgtgctggaacagatccttacgtgcgctgtgttggagtctttccaggtcaggggttctcaaacggatttcaggaccctttacatcatccagaatgatccaatagccccaggagcctgtgtctgtgtggattatgtctgccggctgttagtgtgttagaagttgaggccaggcatggtagctcacacctgtaatcccagcactttgggaggctgaggcgaggatcgcttgaggttgggagtttgagaccagcctgggccatgtagcaagaccccgtctctacaaaaaatgaaaattagccgggcatggtggcgcatgcctgtagtcctagctactcgggaggccaaggtgggaagatcacttgagcctgaaaggttgaggctgcagtgaaccaagattgtaccactgcattccagcctgggagacagagcgagactttgtctcaaaaaaaaaaaaaaccaaataaattgaaagctgagaaattcagagcacaagaagacaagcgcgccccctcttttagctgtcaacatggcggagccgtccctggtgacgcagcctccaaaggcctccctgtgccctcctgagaccgcaagagggaaagtggcagcgacagtgatcgtggtgtctttgtggcggttgtgttgacctcactgacccccgaagtgccgctctagggtctgtcctcagcggtgacccggccgggtcgaagggcagagttccgctgtcactagccctccacccgtcctgtgtgctgggatgccctcgcggcgccgtccacgccaccgccgccccctcttgtgggttctgtctcctccgtgtctaggatcctcctgcatccgtttttccttcctcccttctctccctccgtctgtcttgcccgcacctgaggttgtcgcagaggcgctgagacgggccagcaggagctgtggctgcccctcaggaaggcagagcagtttctcacttccttccccccaggtcccgtcaggcccctgcaggcactctctcttccggctggaggtccctcctgatcgaggcttacacggtctttgctgagctcctaaacttctggtttctatccctaaagttggagaaccactgctccccaaacccggtggcattatctgccctgctgtgccgctaggcagtgttcggcaccctgaaagagagcccctgaatgtggcacgaggggtaggaagtgggcagctcggtggggggggggggtgcagtgagcttttagtcttaagttttcgtttttttttttttttttttcttttttatagagatgggatctcgcttttttcaccaggctggtcttgaacccctggcctcaagtgatcctcccatcttgacttcccaaagtactgggtttacaggcatgagccaccacactcggccctttgtctaagttttcaaaaggaatcagcaaacttagttatcaagttgtatttgtatttatctggacacttttttttcttttcttttttttgcctttaagggagacagggtccacaaggccgggcgtggtggcttacgcctgtaatcccagcactttgggaggctgaggcaggcggatcacgaggtcaagagatcgagaccatgctggccaacatggtgaaaccccatctttactaaagatacaaaaattagctggggatggtggtgcacgtctgtagtcccagctacttgggaggctgacgcaggagaattgctggaacccaggaggtggaggttgcagtgagccgagatcacgccactgcactccagcttggcaacagagcgagactccgtctcaaaaaaaaaaaaaaaaaaaaaaaaagagacaaggtcttgctgtcgtccaggctggagtgcagcggcgtgatcatggcttactgcaacctctgttttccaggctcaagcaatcctcctacttcagcctcctgagtagctgggactacaggtgcctgccaccacacccaatatttaaatttttattaattgaaaaaacttttttgcagagacagggtcttgcctggtatcaaactcctgggctcaagtgatcctcctgcctcggccttctgagtagttgggactacaagcatgagctattgggcctggcctagcttttatacaatgcccatgttacaaaattccaaatgtccaaaaagcaaggagaatatcttccactctgccttgaccttcagtttcccccctgtagtaacctgtctgcttccagaagtgcttgaacatgtgtgcgtttgctatgggtttttttttgtttgttttgttttgtttttgagatggagtctcactctgttgcccaagctggagtgcagtggcgtgatcttggctcactgcaacctccacctcccaggttcaagtgattctcctgcctcagcctcccaagtagctggggttacaggtgcacaccaccacgtccggctaatttttttgtatttttagtagagacggggtttcaccacgttggccaggttggtctcaaactcctgacctcaggtgatccacccaccttggcctcccaaaatgctgggattacaagtatgagtcactgtgcctggcctgtttttttttttttgagacagagtcttgctctgtcgccaggctggagtgcgttggcttgatgtcagctcaccgcaacctccacctcccgggttcaagcaattctgcgtcagcctcccgagtagctgggactacaggcatgcaccaccatgcccggctaattttgtatttttagtagagacgaggtttctccatattggtcaggctggtctctaactcctgacctccagttatctgccggcctcagcctcccaaagtgctgggattacaggcgtgagctactgtgcccagctggttttttttttttttttttttttttagacaggctcttgctctgttgcccaggctggagtacagtggcacgatcttagctcactgcagcctcgaattcctgagctcaagtgatcctcctgcctcagcctcgcaagtagcagggactataggctgtatactactatacctggctgattttaaacatttttatagagatgggttcctgccatgttacccaggctggtcttgaactcctagcctcaaatgatccttctgcctcagcttcccaaggtgctgggattatagacctgagccactgctcctgacctcattttttttttttttttttttgagacagtgtatcagtgtctcccaggctggagtgcagcggcgcgatctcgactcactgcaacccctgcctcttgggctcaagcaatcctcccaccacagccttccaggtagttgggactagaggtaaattttatagtgatgggttttgccatgttgcccaggtgatcttcaactcctggactcaagtgatcctcccgtcttggcctcccaaatcatacctgagattacaggcatgagccactgcacacagccccattttaacttttttttttttctgaggcagagtctcgctctgtcacccaggctagagtgcagtggcgtggtcttggctcactgcaagctccacctcctgggttcatgccattctcctgcctcagcctcccgagtagctgggactacaggtgcccgccacctcgcccagctaattttttgtatttttagtagagatggagtttcactgtgttagccaggatggtttcgatctcctgacctcatgatccacccgcctccgcctcccaaagtgctgggattacaggtgtgagccaccgcgcctagcccattttatcttttctgataatgattttccttttgccaaaaacggcaagtgggttttagattaagtcactccttttaccaggcacagtaggagaccttgagttagggctgaggtggtgtcatttaatagggacattcaacttcactaggttcaatgataggagactttacaaatttccataatggtaaatcttctttcatttaaattattattattgttaatatttttttttttgagacagagttttgctcttgttgcccaagctggagtgcagtggcgtgatctcaactcactgcaccctccgcctcccgggttcaagcgattctcctgcctcagcctcccgagtagctgggattacaggcacccaccaccacgcctggctaattttgtatttttagtagagacggagtttctccatgttggtcaggctggtctcgaactcctgacctcagctgatccgtccgccttggcctcccaaggtgctgggattacgggcatgagccatcgcacccggccaatcatttaaattattaatgaagaataaaaagaggctgggcgcagcggctcatgcttgtaatttcagcacttcgggaggctgaggcaggcagatcacctgaggtcgggagttagagatcagcctggccaacatggtgaaacctcgtctctaccaaagatacaaagattagctgggtatgctggcatgtgcctgtactctcagccattcgggaggctgaggcaggagaatcgcttgaacccgggagacggaggttgcagtgagctgagattgcgccactgcagttcagcctgggtgacagtgagactccgtctcaaaaaaaagaaaaaaaaaagtaagtcccacgtagccatcaccctctgcagtagtcatctgctgtgtctgatcttgttcattttgctcatttctaccctacccacttacctctacctgactggattgtttaagagatgggatcttgctgtgttgatcagggtggagcacagtggctattcacagatgtgatcattttgcatgagaaccccaaactcctgggctcccctgaccctccagcctcagtctgccaagcagctgggactacagatgtgagccactgtactggctcctactggatcattttgaagtgagttacagatgccataactataacacagacatcataggtacaggaatttcagtgcatcttccccagtggctcatggatcacacagatagaaaatcggtcaggagggccacgcgcggtggctcacacctgtaatcccagcactttgggaggccaaggcgggtggatcacgaggtcaagagatcgaaaccatcctggccaacatggtgaaaccctgtctctactaaaaatacaaacattagctgggcgtggtggcatgcacctgcagtcccagctactcgggaggctgaggcaggagaatcgcttgaacccaggaggcggaggtcacagtgagtcaagatcgtgccactgcactccagcctggtgacagagggagactccgtctcaaaaaagaaaaaaaaagaaagaaaatcggccaggatgccgggcacggtggctcagccctataattccagcacttcgggaggccaaggcgggtggatcaactgaggtggggatttcgagaccagcctgaccaacatggagaaaccccatctctactaaaaatacaaaattagccaggtatggtggcgcatgtctgtcatcgcagctactcgggaggctgaggcaggagaattgcttgaacctgggaggcggaggttgcagtgagccgagattacaccactgcactccagcctgggcaacaagagtgaaactccgtttcaaaaaacaaacgaaaaaggaaagttggtcaggatgctgggcacagtggctgggtcctgtaatcccagcactttgggaggctgagtcagaaggatcagttgagcccaggaatttgagaccagcatgggcaacatggagaaaccctgtctgtacaaaaaatacaaaaaactttctggacgtgatggcccatgcctgtagtcccagttacttggaggggccgaggcgggagggttgcttgagcccaggaggtcgaggttgcagtgagccatggtcgtgccactgccctccagcctgggcaacagggagggagaccctgttttaagaagaaaaagaaaattgataaagatgtagatgatttgaacaacacaagtaacagggttaccgtaatgacatggatggaatctgaacccagcaagagagaaaacacattcttctcaggccacgaggagtgcttagggaaactgaccacatacaaggcaagtcttaaaaactcgatttttatttttatttgtatttacttattttgtttatttatttgagacagtctcgctctgtcgcctaggctggagtgcaatggtgagatttcggctcactgcctcccaggttcaagctattctcctgccttagcctcctgagtagctggaattacaggcgtgcgccaccacacccagctaatttttgtatttttagtagagatggagtctcaccatgttggccaggctggtctcgaactcctgatctcaagtgatctgcctgcctcggcctcccaaagtgctgggattacaggtgtgagccaccggacctgggcttttgttttttatgttttcatttatttatttgtttttgagatggagtcttgctctgttgcccggactggagtgcagtggtgtgatctcggctcactgcaaactctgcctcctgggttcaagcaattcttgtgccacagcctccccagtagctgggactacaggcgcccaccaccacgcccgggtaattttttgtgttttcagtagagatggggttttgccatgttggccaggctggtctcgaactcctgacctcaggtgatccatccgccctcggcctccccaagtgctgggattacaggcgtgcaccaccgtgcctgaccctttacaaatttagaacaattactgccttactgaccatgttttctctcacctgtggggtcagaacttaacaataactaagcttcctccttcgcgcttcgggttgtgcaagcttcctcctgcctgctttggggcctttctgcaatgttccagaagcggcatcaggaggctgcccagccagctcgtgagttgtgttctggagtcagagttttgtgccagcctgggccaggccccatccccacttcccgccccatttgcccctgtctacatcattgtactgggagacacttcctgtccctcctacgtagcccacgctaagcagggtgcttctatccacctcacctttccgatgtgggaagggccgaagtcatggaggggcgacccgtcaggcccagcaagggtggcacagatgttgtccctagtaacagatgagaggggatgggctgggactgcaggcctggctccccaagctgctcctgcgggtcaggggctgcccattagcctggccagggcccctcattggatccctcctggccgcccagaccacagcccttgcccccctgcctacccgccaccagttctcattggccctgcctccctgcttaactctgccgccttggcttcccctcctcggtctgtctcctccccgacttgtcctctgtctgagtctggcaggacagagtccgaccgtctggccccctcctggctccgtctgctcctcctgccgcctcctgctgtcgaggtcacttggttcttggcctgtctggcccccagccaccctgctggctgcctgctctccaggcagcccctcgcccagggctgcacctccgacctgtcctccgtcttgggtggggctgggactgtattttccatcctctgcagtggtctggtttccctcgtgcgctgaggcccctctgcttggctgcccctggctgccccatgcagctgagccatgagcgcggcctgtgtgcccctctcccgctggctggagctcaggatgctcacgccgctctggcagatatcgctgctgcaaacataggaggagcagctgcccctctgcgcacgtggccttcggacacatgtgagggccgctctagcttgggtgctcactgcgggtgattccaccctccaggggacactgggggatgtctggggacattcatgactcgggcgctcctggcgtggagtaggtggaggcctggagtgctgattagcaccctgcagggcccaggaaggccccaccccagagagtgatcagaccccaaatgtcagctttggcaagagcagtgtgcctggccacagaggtgctggcccggatgcagatgagtgccccatccatccctctgagcgccgtgtggcttgtcccatgctgcttttcctgacccagtgatattgggggcacttgacttctctctttttaagacggagtctcattctgtcacccacgctggagtgcagtggcgagatcctggctcactgcaacctccacctcccaggttcaaatgattctgttgccttagcctcttgagtatttgggattacaggcactaaccaccatgcctggctaattttttaattaatttttaatttttttatttttttgagacggagtctcgctctgtcgcccaggctgcagtgcagtggcgtgatctcggctcacggcaagctccgccccccgggttcatgccattctcctgcctcagcctcccgagtagctgggactacaggtgcccgccaccacgcctggctaattttttgtatttttagtagagatggggtttcgccgtgttagccaggatggtcttgatctcctgacttcatgatccacccgcctcggcctcccaaagtgctgggattataggcgtgagccaccgcacccggccaatttttgtatttttagtggagacggggtttggcaatgttgcccaggctggtctcgaactcctggcctcaagtgatctgcccacctcggcctcccaaaatgctgggattacagagtaagccactgtgcccagccccttttttagaaaaaattaataaactttattttctagagcagttctaggttcacagcaaaattgagcagaaggtacggagttcctatagaccccctgccccaacaggcatagccgcccccactgtcagcctcccccacagagcggtgcatcggttacagttgatggcccgatggccctctgtggagtcatcttcatctctgagtccacagtctacatacaccaaggcttgcccttggtgttaagtttttttttttttttttttgagacagtgtctcacttgtcgcccaggctggaatgtagtggcgtgatctcggctcactgtaacctctgcctcccaggttcaagcgattctcctgcttcagcctcctgagtagctgggactacaggcgcgtgccaccacgcctggctaatttttgtatttttagtagagacgaggtttcaccatgttggccaggctggtctcgaactcctgacttcaagtgatccacctgccttggcctcccagagtgttgagatgacgggcgtgagccactgtgcctggcctgcttcatgttttaaataacggctttattatatccctgcagttcacccagttaaagtacacagttgaggtatattcatagttgtgtaatcatcactgcagtctattttagaacattttgtcaccttgaaaggaaaccctgaaccctgtcccagctactgcttcctttttctgcatctcctcccgcagcccctggcaccctcaaatccccttcctgcctctgtggcttggcctgtcctggaaatttcatagaaatgggatcatgcactgcgtggccttttgtgtctggtgtttctcactgagtgtgatgtcctcaaggtgcatccacactgtggcctgggtcacagccttgctccttttcatggctgagtcgtattttattttgccttatattttatttattttattttatttcttaagacagtcttgctctgttgcccaggctggagtgcaatggcacaatctctgcttactgcaacctccgtctcccaggttcaagcaattctcctgcctcagcctctggagtagctaggattacaggcacccgccaccacgcccagttaagttttgtatctttagtagagacggggtttcaccatgttgaccagggtggtctcaaactcctgacttcaggtgatctgccctcgttggcctcccaaagtgctgggatgacaggcgtgagccaccgcacgcggcctgagtcatattttgacacatggatggatggccacattgtgttgatcctctcacctgttttttcttttctttctttctttttttctttctttttgagacggagttttgctctttttgcccaggctggagtgcagtggtgcaatctcggctcactgcaacttctacctcccaggttcaagcaattgtccttcctcagcctcccgagtagctgggattacaggcacctgccactatgcccggctaattttgtatttttagtagagacaggtttcaccatgttggccaggctggtcttgaactcctgacctcgtgatctgcctgcctcggcctcccaaagtgctgggattacaggcgtgagccaccgcacccagcctcaatcccctcacctgttgatggacacctgggttgcttccactctcaggctgttgcgagtgatgccgtgtgaacctgcgtgtacaggttgacgtgcctcttcctctccatccgtgccacctctccccaaagccagctgctctgtgctggagagctggccctgagcctcctcctggctcccaggcagcgcctagcatgtcagaggcactcacttctagctgggagaacagaggggctgaagcggatattggtgggccctcgatgtccacggtgggtttcagagcagcccttgaaacccttgtagctgtaggtgggtgtgtacatattcaaacgggtttttctgatgctggtggatcgcttgcttgagccccggagttcaaaaccagcttgggcaaagcagcaagacctcatctctaaaaaaaattagctgggcatgggtgatgtgtgcctgtggtcccagccactcaggagcctgaggcaggaggattacttgagcccaaggttcgatgctgcagtgagctacgattgcaccactgccctccatccttggcaacagagtgagatcctttctaaaggaaaaaaaaaaaaaagtccgggtgcagtggctcacgcctgtaatcccggcactttggaaggttgaggtgggcggatcacgaggtcaggagatcgagaccattctggctaacatggtgaaaccccacctctactaaaaatacaaaaattagccgggcttggtggcgggtgcctgtaatccccgctacttgggaggctgaggcaggagaatggcgaacctgggaggcggagcttgcagtgagccaagatcgtgccactgcactccagcctgggcgacagagcaagattccgcctcaaaacaaaaaacaaaacaaaacaaaacaaaaaaaaacaggccgggtactgtggttcatgctgtaatcccagctctttgggaggccgaggtgggtggatcccttcagcgtaggagttcaaaaccagcctggccaacatggcgagaccctgtctctactaaaaatacaaaaattagctgggtgtgatggctcatgcctatagtcccaagctactcaggaggctgaggcacaagaatcgcttgaacctgggaggtggagattgcagtgagctgagatcacacccctacactccaccctgggcgacagagtgagactccatctcaaaaaaaaaaaaaaaaaaaaaaatttttttctggaaaagatgagtcagcctttatcaggttcttaggtttatggtgaacaaagaaagaaagcctgcagagaagggccttggccttcactgtgacccccatgctgtttgcatttgaacagccgtcaggccttggatccccaaggggcgaaaggaggaagagctgacattctatgtatgtctctctcctcccttttcctaaggtctctctcctcccttttcctaaggatgctcctgaaccagggcatttctgcctctaggggacacatggtgatgtctgggggacatcggttgttgtcatgactggtggaggccagggccgctgcagtgcctctgcagtgcccagcacggccccacggtccagtgcccagagggggagacccagcccatcccagagtggtcagccctaatgtcagccatgcttaggtcgagaaacctgtattaattacatggaaaccaaccgagtccaatcctgctcgcaccaggcacgggataaactcctgacggggcagacgtggaaaccagggggacccccagctcctgggattcacctcctctctcccttcccactcagtgtgtggattttaatgcgtgcagcctcctgggacctcagtagggcacagcatcatgggataaggagtttcttgggggcctgtggaatccttcaccagggggtctcacccagggtgacttcacacccccccaccccataccgtatgatgtctggggacatttgtggtcgtcacaactacggggtgctcctggcatggagtaggtggaggccagggacgctgctcagcaccctgcagtgcccaggatggctccgccccagagaatggtccaggacctggccccaatgtctgcagtgccgggggagaggaacttgttgccttgggggcatctagatggcaaatcatcaggaggggggggtcctagatggcaaaccaccgggagagggtccttgttgggtgttggtggagtgtgaaggggcagcttctgacaaaatgcctcggcttctccagcccccagatacagctcaggtgatgagctcctccttgcatacctgctgagtcaggtgacccgaggggcaggctgtggagccaggccccaggggttgagcgcatcaggataaaagcgcacaaagggcgggtggagctgagggtcagaggaggtgccctggcaggcgagattggcgctggagccttacccaggaagctcataggaagctcatggatgctggcatgtgcctcttgctgttcaggtgggacagggtctctctgtctcgacactggacagtgggaccgtcctgggcactgcagggtgccgagcagcgttcctggcctccacccactccatgctaggagcttctcccagtggcgacaaccacaaatgtcccagacgtggcccagcgtcccccggggtctgaatcatgtttggttgagaagcagtgacagaggtgacacatgttcactgtcacaaaagctgccgtaagcacgaagtattaggaaaaactcccaagacccccatgtgtgcgtggtgccccgtgatgatgttttgtgcttctgggtgcttcctgcatgcagtgccaaaagccctcgctagaggggcctgagaccctgagggaagggactggggtgccgcttgtgagcgggacagccccctggcatggcccaggtatcatggctctttactctgatgcagattgccccccccccacaagggctgggacacagtgtttggttcatcactggtgcccacagatgcccacttggcatttggtggctaaacagcgtctgcctctggtgtccctgcagatggaggacggccataccctcttcgactacgaggtccgcctgaatgacaccatccagctcctggtccgccagagcctcgtgctcccccacagcaccaaggagcgggactccgagctctccgacaccgactccggctgctgcctgggccagagtgagtcagacaagtcctccacccacggtgaggcggccgccgagactgacagcaggccagccgatgaggacatgtgggatgagacggaattggggctgtacaaggtgagcctcccctccgcagctgctctggggttggacgttctccctgccattctggtctttgcatacccagggctcacaggaggggcttcccacgcgcctctctagctctggctgggcagaaatggccaaggggtggtttcctgcacgttccttgaggggaacatggtaccctgggattcctttgtggacctctagagcagagtcctgttcggggcctgcaggtgtcttctccgtgaagcttgcagtggctgtgacgtttctgaacttgctgctaccatgtaagatcaggaaatgtcacagaaagatctgggtttccagcttttttatttttttattttttttttggcagggtctcactttgttgcccagcctggggtgcagccgtgtgatcacagctcactgtagcctcgaactcctgggctcaagtgatcctcccacctcagcctcctgagtagctgatgttataggcatgtgccaccacgcccagctaattttattttattttattacttttttaatacatggtctcattctgtcgcccaggctggagtacagtggtgccatctcggctcattgcaacctccaactcctgggttcaagcaattctcgtgcctcagcctcctgagtagctgggattacaggcatgtgccaccacacctggctaatttttgtattttttgtagagacgggatttcgccatgttggccaggctagtcttgaactcctggcctcaagtgatcttcccgccgcagcctcccaaagtgctggaattataggtgtgagccactgcacccagtctgttttattttttagtagacacagcgtcttaccatgttgcccaggctagtcttgaattccggggctcaagcgatccacctgcctcggcctcccaaagtgctggtattccaggcgtgagccacgacgccctgcctggatttccagcttctcttgacaaatgggcagctctggtctctcagggcctcccagcagctgtggctgaagcagagccgcaggggcctttgttaagacagtccatgccccctggccccgcatccccgtcacccctgccggggctggtttctcatggtcagcggttcccagccagggaggagaaacctcgctgtgggcattcgagtttgcgccctggttccagagcatcccagtgtccgagaaccaaggtggtctcccgtcagttttcctcaccccgttgggatgccagacttccctcattcctcacaggtcaatgagtacgtcgatgctcgggacacgaacatgggggcgtggtttgaggcgcaggtggtcagggtgacgcggaaggccccctcccgggacgagccctgcagctccacgtccaggccggcgctggaggaggacgtcatttaccacgtgaaatacgacgagtgagtcatggcaggtgggcgggcctgggtattcaggctctgtgacgcgcatccttggctgcgggtgttcaggccagagcttggcactgtctcgagatggtgatcaggatctggggccccatcctcgaattcctaacagcatacgaggctgcccacttggggactagcctggggacccgaagccggctgccccctcctgtgtctccgcggagggttctgctcgatcagtggctgaaactgccaccccatcagtttttctgttttattccatcttccgggtttgtcatctctccctcatccccacccctaacgtcagtctccagtctttgcacaagtgtttactgggcacttcctacctgccaagttcggggtccacacaccagtggacacagatggtggctgcgtctgtccgtgctgccatcgtgagatttcacagacggtgtggcttaaacacggacattggttgacttgctcactgcaacctctgcctcctggattcaagcgattctcctgcctcagcctcctgagtagctgggactacaggtgcccgccaccacacccagctaatgtttgtatttttattttattttatttttattttattttttcgagacagagtcttactctgtcactcaggctagagtgcaatggcgtggtctcagctcactgcaacctccgcctcccaggttcaagcgattctcctgcctcagcctcccaagtagctgggattacaggtgtgtggccaccacgcctggctaatttttgtattttcagaagagatggggtttcactatgtaggtgaggctggtctcaaacttctgacctcgtgttccgcccgcctcagcctcccagagtgttgggattacaggtgtgagccactgtgcccagcttattttatttttttgagacagtttcactctgtcccccaggctggagtgcaatggtgtgatcttggctcattgcaccctccatctcccgggttcaaacgattctcctgcctcagcctcccaagtggctgggactacaggcgtgcaccactgcgcccagctaatttttgtttttgttttgtttttgagacagagtttcactcttgttgcccaggctggcgtcaatggcgcgatctcggctcaccgcaacctctgcctcccgggttcaagcaattctgcctcagcctcccgagtagctgggattacaggcatgcgccaccacgcctggctaattttgtatttttagtagagatggggtttctccatgttggctggtctccaacttccgacctcagatgatctgcctgcctcagcctcccaaagtgctgggattacaggcatgagccaccgtgcccggccatgcctggctaatttttgtatttttagtagaggcagggtttcaccgtgttggtcaggctggtcttgaactcctgacctcaggtgatcttcccgcttcggcctcccaaagtgctgggattacaggcgtgggccaccttgcccggcctctcctcttgttctaaagacaccagtcctgttggattggggcccaccctactgcagtgtgatctcatcttaatatgatttcatctgcaaaggttctatctacaaagaccctgtttccaaaaacaatcctattcgtgggtactggggatcagcctttgaacatctctttttgcaggggacacgggcaacccataacaattttgtacctggaatgtgccttaatatacctgtgtgttctcaacaccagcatataagcctgttgggaggggcctctgcacactgtcgggaggggccgtcccacctcggctcgtttcccattgagggaaggaggcttggtcttagcacggggtctaaggcccgggctttcctcccagctacccggagaacggcgtggtccagatgaactccagggacgtccgagcgcgcgcccgcaccatcatcaagtggcaggacctggaggtgggccaggtggtcatgctcaactacaaccccgacaaccccaaggagcggggcttctggtacgacgcggagatctccaggaagcgcgagaccaggacggcgcgggaactctacgccaacgtggtgctggggtgagcctcgcgtcctggggcgagcccttcctctctcctttcctcccctcccggggcccccggactggctttgaagccgtccagccagcgctgtgtgtgcgaggcccttagcctccggcctggccttcctgcctcccctctggggtctgttcctgctcactgctgagcatctttctaagaccgaccaccttgtgcccctgagtgcctctgcccagggaactgtctctgacccccaggccctgacaggcagagttgtcaaacttcctttttctcatggtgttttttttatcgctctgttgcccaggctggagtgcagtggttcgatctcggttcactgcaagctctgcctcctgggttcatgccattctcctgcctcagcctcccgagtagctgggactacaggcgtctaccaccacacctggctaatttttttgtatttttagtagagacggggtttcaccgttaaccaggatggtctcgatctcctgacctcgtgatctgcctgcctcggcctcccaaagtgctgggattgcaggcagtgagccaccgtgcctggcctcaagctttctttttctctcttgtttgtttcaaatttggtgaataggtcccattcacagggtcaaaatagaaagcacccaagaccacacatgaaggttctccctcctctgcctggtcacccagttcccctttttggcgacatcactgttaccaactttccagggacattctgttcataaacatacacgccaaaccacaccgcttaggagttggcaaactgcagtccacaggcctgctgtggtccgctgccggctttgactaatagttttattgggacgtggtcacacccatttttatcttattacctgtggttgcttttgtgttataagagcagagttgtgtagttgcaacagagactatgcggcctacaaagctgaaaatccttcctatttggccatttgcagaatcattttgcaaagcctgttctttctcccttgcctctttgtgtgtgtgtgtgcgtgtgtgtgtgtgtgtgtgtgtgtgataaaatgtatgtaacagaaaatttaccttttttttttttttaaaagacagagtctccctctgtcgcccaggctggggtatagtggcatgatcttggctcactgcagcctccgccttccaggttcaggtgattctcctgcctcagcctcccaagtagttgggattacaggcgcccgccaccacgtctggctaatttttgtatatatatatatatttagtagagtctgggtttcaccatgttggccaggctggtctcgaactcctgacctcaagtgattcgcccgcctcagcctcccacagtgctgggattacaggcatgagccactgcgcccggccaaaaatttaccattggaaccatgtttaagcgcacagttcggtggcattaaacgcatttacgttgttacgcaaccatctccagcactttgtcctcttcccaaactgaaactctgactccatgaaacactcactccctagcccctgacacctctgcatcctactttccatctctgtgaatctgacaactcgggggacctcctaggaatgggatcacacaggatttgtcctttgcatctgttcactgacgtcactgagtgtgatgtccttgaggtgcatcaggctgtagcctggtcggaatttccctcctttttgtggccgagtgatagtacgtgacgtgttgtctataaacacgagcatcttggcaacggcgttccaagtacaggtacagcaagcacgcagaggtcctgggctgggacatttatggtgcatctgtggcccggtagggaggtcagtgagctgcgggtgatggaggggagtggctggggctgtgggagcctcctcactgagtctgggccttaagcgcgtggctcgggtgtggtgtggaattggtctttattctctgctaggcgcatttctgaatctgagattttctgagaaactatctggattgttatatggaatctgatttttaaatgctggtgactaactttttttttttgagacagagtcttgctctgtcacccaggctggaatgcagtggcaggatctctgcttactgcaacctccacctcccgggttcaagggatcctcctgcctcaccctcctgagtagctgggactataggtgcccaccaccagctaatttttgtatttttagtggagacagagtttcaccatgctgcccaggctggtcttgaactcctgacctcaggcgatccacccacctcagcccctcaaagtgctgggattacaggcgtgagccaccgcacccagcctatctggttttataaagggcagttcccctgcacacactcccttgcctgccgctgtgtaagatgtgcctgtgctcgttcaccttccaccatgattgtgaggcctccccagccatgcggaactgtgagtccattaaacctctttcctttctaaattacccagtctttattatttagtatgtctttattagcaacatgagaacagactcatacaaccccttccaagctcttgtggtggctgatataatccactactttgcggttgaaggatgggggcttcatttttttttttttaacttggttcttggaggccgcctgcagttcccagggcccacctgcagttccttgccccatgggcttctctgatgtggctactgatgtcaagctagcaagggaggtcttcagctagtcggctagtaagatatagagcatcgtgtgatgtgtcatcgtcccaggagtgacagtccgtcagctctgctgtattttatgggttaggtttaagtgacagccctgtccatacttttatggggagaaacgcctacaaatgcgtggttgccaggaggtgggggttgtggggccaccttaggctccatccgcaccagttatacaccagctgctgcccgtttaccctgagacagataacctgcccagccagcacccacgggcttcctccacctcagtccctcccctagcagaagaaaactgcatttctgcacattgactgtcacaaggcaggggtgtcaccaggcagggaaacgaagatacctggccgaccacaccttggggtgtttgggttcttcgattcattcatgcttgtgtcccgagccctctggggatgcaggaggcacagcgggaaagggaacaggtgctcggtccaggcggccttggggcagacactgtcccttgccagccccatgggagcttccagggatgcagtgagagggtcacgctgagccgagttgtgcctcgcaatgagtttgtgatgtgtgcccatcgttagcaccttcgacttctatcatctgctgagtcaggcatcatacaagatgagacagagaaacgcgattgcagtccctgtcttaggaggcacccagcctggtgtgggagacagatctgcagatgacagaccagggagatgcgtgctctgagacaacacgcgaggatgggtggcagagatggccgagtggactctgggattgggaggctcagataggtggctgagccccaggtcctgctctgggcagtgctaggagctaccagcctttgccagggctgacttctaaatgcaagccctctacactggtgtctctgcagtgtggggggtcaattcattcatcattcattttcattaaattttaccttgcattgtagattcacatgcagttataatgtagagatggctaggcgcagtggctcaggcctgttgtcccagcactttgggaggctgaggtgggaggatcgcttgagcctgggaggttgaggctgcagtgagccgtgatcacaccactgccctccagcctaggcaacagcaagagagtctgcaaaaaaaaaaaaaaagtgaaaagaaaaaaaaacaggctgtgtaccctttattcagtttcccccagtggtaacaacttatattaataaactatactgtgttatcacaactggaatattgacattgatacagtcaaaagtgagtttcctcctcacaaaatccttctcgttaccccttttatagccaaacccacctccccatccccacctggtccctgacccccggcaagcaataatttttttttttgttggagacggagtctcgctctcttttgttctccattcatacaattttgtaatttcaaggattttacaatttcaactttgtaataaggattcccgttatataaatggaatcacacagtatgtaaccttttgggattgattctttttttcccgactctccataattacagattaattgaagttaccgcatatcagtagctcattccttttcatccctgagtagtattctgtggtatagatgggccacttttttttttttttttttttaacgacccattggatatctgagctgcttccaggattttttgctgtttaagatttgtttatttttttgagacacagtcttgctctgtttcccaggctggagtgcggtgatgtgatcttggctcactgcaacctccgcctcctggattcaaacgattctcctgcctcagcctctggagtagctgggattacaggtgcgtatgccagcacacccagcttatttttgtatttttagtagaggtggggtttctccatgttggccaggctgatcttgaactcctgacctcaggtgatccgcccgccttggcctcccaaagtgttaggattataggcgtgagccacttcgcccggccagtttaggatttatttgagtaagttaataagaaacagtggtctgcaattctcttgttttgtatggtctttgttggttggtcaataccagccttataatgtgagctgggaaatgtttattcctttttctgttttctggaagagattgtgtaaaatttacgttaattcttctttaaaggtttgatagaattctttaacgagaccataggctgggtgcagtggccgatgcctgtaatttcagcacttggagaggcggaggtgggcggatcacttgaggttaggagtttgagaacagcctggtcaacatggtgtgaaatccccgtctctactaaaaatacaaaaattagctgggcttggtggtgtgcacctgcagccccagctacttgggaggctgaggcaggagaatcgtttgaacctgggaggtggaggttgcagtgagctatgatcatgccattgcactccagcctggatgacagagcaagattccgtctcggtggggtgggggaggaagggaagctttactgaggccatggagatctggagatgtcttctggaggagcttttatgaattgaatttcttctatgcttatgtgactgtctggactatctgtttcatcatgtttgagctgacatactttctgggttttggggaattagccggtttctctgagcataaagtcatttgtattatttccttattctctgatgcctgaaggatctagtgagatccctgttttattcttggtgttggtaatttatgttttctttttatttttgtcagtctttaccaattttatttttgaggatcttagacctttccctcccttctcatttatttgtacagcaagaataagacagtttttttttgtttgtttgtttgttttgagacaaggtctcactctgtcacccatgctggagtgcagtggcgtgatctcagctcactgcaacccccagatcctggcttcaagcgatcctgacctcaggtgatccactcgtctcggcctctcaaagtgctgggactacaggcatgagccactgcacctggcataagagttttgttttggtcaggtttttttttttttttttttttttttttttttgagataaggtcttgctctgttgcccaggctggagtgcaatggcaagctctcagttcactgtagccccaacctcctgggctcaagcaatcctccaacctcagcctcccacgtagctgggaccataggcgtgcaccaccatgcctgactaatttttttttttgttttttgatgagacaaagtctcgctctgtcacccatggtggagtgcagtggcacgatcttggttccctgcaacctccacctcccgggttcaagcgattctcctgctttagcctcccgagtagctgggattacaggcgtgctccactgcacctggctcatttttttttgtattttcagtagagacagggtttcaccatgttggccaggctggtcttgaactcctgaccttagataatccacccgcctcagcctcccaaagtgctaggattacaggcatgagccactgcacccggccattttttttttttttttttttttaattttcggtagcaatgggggtctggctagattggtctcgaacttttgagttcaagtgatactcctgcctcagcctcccaaaaggtgctgggattataggtatgagccactatacccagtcttagaatatgtttttctttctttttttttgagacggagtcttgctgtttgctgtctcacctaggctagagtgcagtggtgcaatcatagctcactgcagccttgaactcctgggctgaagcaattctcctgccttagcctccttttccttaacacttaatttgttgaggaatcctggtcatttgtcccaggagttccaaatggctctatccagactgtagagatgaccaggagatgtcacttgctgtgtgcgtctgtgctacctgtgagctggtaggtcagtgtgttcccacactgtcccatagccaagagccacctgtgctgtgcttgaaatgtggccaggaggaactggaatgtactgtgagtgtaaaatacacatgggtgccaggcgcagtggctcatgcctgtaatcccagtactttggggggccgaggtgggcggatcacaaggtcaggagatcgagaccatcctggcaaacacggtgaaaccccgtctctactaaaaatacaaaaaattagccaggcgtggtggcgggtgcctatagtgccagctactcaggaggctgaggcaggagagtggcgtgaacccgggaggtggagcttgcagtgagccgagatcgtgccactgcactccagcctgggcgacagagcgagactgtctcaaaaaaaaaaaaaaaaacacatgggctttcagagacctggtacaaaagaagaatgtaaagtagctcattaataactttttcatattcattccatgttgaaataatcttttgtctacactgggttctatggaacatattccaattacttccacctatgtttacctctcaaacgtgcttattaggaaatttagaattacatacacagcgtgtgttcaagtgctgtttccctcggacgttgctgatggggatgtcggattattgatctcgggggatcagtttcactcacaggagttcttgtattttgatgtaggccattggatcaagcgttgcctttatgattttttttttttttttttttttttgagatggagtcttgctctgtcgcccatgctggagtgcagtggcgtgatcatctcagctccacaacctccatttcccaggttcaagcgattctcctgcctcagcctcccgagtagctgggattacaggcacgggccaccatgcccagctaattcttgtattcttagtagagacggggtttcactatgttggccatgctagtctcgaagtcctgaccctcgtgatccacccaccttggcctcccaaagtgctggaattacagatgtgagccacggtgcccaacttgatttatttatatatttttttgatgagatggagtctcactctgtcgcccaggctggagtgcagtggcacgatcttggctcacttcagcgtctgcctcctgggttcaagcaattctcctgcctcagcctcctgggtagctgggattacaggtgcgcgctaccatgcccagctaatttttgcatttttagtagagacagggttttaccatgttggccaggctggtctcgaactcctgacctcagatgatcggcctgcctcggtctcccaaagtgttggaattacaggtctgagctaccatgcccggccaacctttatgagtcttgcttgtcggttcttgtggatttggtgctccttagccaaaggttcaaactcattcttcccagggcatcctgcaatgaaactctggtttctgtgttttgtttttttttttttttttttttttgagactgagtcttgccctgtcgcccaggctggagtgcagtggcgcgatcttggctcactgcaacctctgcctcccgggttcaagtgattcttctgcctcagcctcccgagtagctgggattacatgcgcgcttctccaagctcagctaatttttgtattttcagtggaggcgggggttcaccatgttggccaggctggtctcgaactcctgacctcggcctcccagtgttggtattacaggcgtgagccactgcgccctgttccgtttcatgttgcttctgtgagtgcagctttgattgctagggggcgtagctgagctgttgccccaggcatcccgagaacccgtggtgttcaagtgctgtgagtagatttaggggcctcggcaggccagaatgttccagcgtcctcgttccttgcagggatgattctctgaacgactgtcggatcatcttcgtggacgaagtcttcaagattgagcggccgggtgaagggagccccatggttgacaaccccatgagacgtgagttctgagccagcctttccccatcttccgcggtgggcacggggcgggggctcttgtcccgtctctggcttggccgggccccgccggagctgaccctgccgccccgtgcccagggaagagcgggccgtcctgcaagcactgcaaggacgacgtgaacagactctgccgggtctgcgcctgccacctgtgcgggggccggcaggaccccgacaagcagctcatgtgcgatgagtgcgacatggccttccacatctactgcctggacccgcccctcagcagtgttcccagcgaggacgagtggtgagtgcggccctgcccgccgcggggagaccagagcgccccctacaaatccccagaggggcactgaggagatacaggagaggggcaggcgcgggggctcacgcctgcaatcccagtgctttgggaggccgaggcgggaggatcacttgagctcaggagttcaagagcagcctgggcaacacaagaccagcctgggggacgtagagactctgtttctttttttgtttgtttttttgagacggagtcttttttcttttctttttcttttcttttttttttgcggcggagtctcgctgtctcccaggctggagtgcagtggcgcgatctcagctcactgcaagctccgcctctcgggttcacgccattctcctgcctcagcctcccgagtagctgggactacaggcgcccgcctccacgcctggctaattttttgtatttttagtagagatggggtttcaccttgttagccaggatgttcttgatcccctgacctcgtgatccgtccgtttcggcctcccaaagtgctgggattataggcgtgagccacctcgcccagccttgagacggagtctaatggcacgatcttggctcactgcaacctctgcctcccgggttcaagcaattctcgtgcctcagcctcccgagtagctgggattacaggtgcctgccaccacatccggctaatttttgtatttttagtagagacggggtttcaccatcttggccaggctggtctcttaactcctgaccttaagtgatctgcctgcctcagccttccaaagtgctgggattacaggtgtgagccaccatgcctggcctggagaccccatttctacaaaaaatgtaagaaaattagctgggcgtggtggtgctcgcctgtggtcccagccacttgggaggccgaggtaagaggatcggatcgctggagcccaggaggtcgagggtgcagtgaactgtgatcgcgccactgtactccagcctgggtgatggaagtgagaccctatttctttagaaaagtaaaaatgaggtcaggtgcagtggctcatgcctgtaatcccaggactttgggaggctaaggtgggtggatcacgaggtcaggaaattgaggccagcctggccaagatggtgaaaccccgtctctactaaaaatacaaaaaagttagccaggcgtggtgccacgcgcctgtaatcccagctactcgggaggctgaggtaggagaatcgcttgaacctgggaggcggaggttgccgtgaactgagatcgcgccactgcactcaagcctggcgacagagtgagactaagtctcaaaaacaaaaaaaaagggggggtggtgaggaaatcttcccatgttgcttgagtgggtgagacctgcggccagccagggaacagagtgcagggggcttcacagcttctgtgagaggaggtttcgtagccactgtgttcctggcgcacataatgacaattgcggatgtggatggggaggttgtgatgtgctaggctcgggtctgaggacctgcctgtggtcattcctccagcacagaagtgggtgttgttgttgccctgccccccctccccacatcgtagagatggggaaactgagtccacggcagtgagaaggcactcatggaatctgcacgtgtatttcccacatcccacattgcgttcactctcactgttgcaagatccgtggaattctccgtggaaggccaacagagaacctgctttcttttttttttgagatagagtcttgctctgtcctccaggctggagtgcagtggtgcaacctcggctcactgcaacctctgcctcctggtttcaagcgattctcctgcctcagcctcccaagtagctgggattacaggtgcccaccaccatgcccggctaatttttgtatttttagtagagatggggtttcaccgtgttggccaggctggtcttgaactcctgacctcaggtgatctgcccgcctcggcctcccaaagtgctgggattacaggcgtgagccactgtgcctggcttagttcgaatgaatttaaatgtaaacagcctcgtgtgccaagcggcctgcaatgtggacagggcaggatggtagtggtgccaggcggggagagccatgtccgtggtgtgtgggcagagggcacatgttggctgagacatctgccaggctaggcgtgggcagtgacaatcccgacctcgcaggtactgccctgagtgccggaatgatgccagcgaggtggtactggcgggagagcggctgagagagagcaagaagaaggcgaagatggcctcggccacatcgtcctcacagcgggactggggcaaggtgaggcgggtccttcccacgtgcccgtggcccctccccgcctgccagggctcacgctgttgttctttgtgtctgtgcctgggacagggcatggcctgtgtgggccgcaccaaggaatgtaccatcgtcccgtccaaccactacggacccatcccggggatccccgtgggcaccatgtggcggttccgagtccaggtacctgcagcgtcccggggctccaggggccacgcgggctcatcctgcttttctgggggcagtttctcctggctttggccagccaggggtcagggtggttaccagtggtgcctcggctagccgaggaggggtgtggaaagcctgcaggtttgggtttactccttattttaccagggacctgcaatgaatccttgggggtgggggctgctgctctgctcagagacacgtaaggtcattcccaaagctcctgtcccagggaaggggtggcatctgctaagagggacctgtctcagcgctggttgtgatctatcattggggcagcccctgcctgtgactgggtgttgacagtgctgggcgctgtcagctgtgggctgtgtgtcacggcagacgagacactttggcactagtgacattggagccagatggttctctggggcggggccatcctgggcactgcagggtgctgagcagcatctctggcccccacccactccatgtcctcccaagtcatgacaaccagaaacgtctgcagacatgagtgtccccttggaggcaggattgcccctgggtgagatgcactgagctgggtggacaagctgggcctcatcatggagttcatggggccaggcgtgcagggctaggagctcctggggcagcgctgtatccctagtgctcagcggccagccggggccccatgctcaggccagggcctctcaaggcattttgtggagtgagtggcaggctgcacctcaaccggcctaatgaaggccggcttttatatcataacctcatttagaactcagtcacccccacttttattttttttgagacggagtcttgctctgttgcccaggctggagtgcagtggtgcggtcttggctcactgcaacctccctctcctgggttcaagcgattctcctgcctcagcctccccaatagctgggatcacagggacatgccaccacgcccagctaatttttgtatttttggtagagatggggtttcaccttgttggccaggctggtcttgaactcctgacctcaagtgatccacccacctcggcccccgaaagtgctgggattacaggtgtgagccaccgtgcctggccgtcaccccccattttctagaggccgaagaggagcatcggagatcagcagtgaggatgccccgtgcacgcttgatggggctggaattcacgccagctggtttttttttttttttttccatggtgcagctcaactccggccgtctctagccgagcagcacacgtagtaggtgactcgcaggcctgaggagtttggtgtaaaagtgaggccgctggctgctcggggtagggaggaggagggcggtggagcttctctgcagcagtcattgcagaggacaccatgtatatcttggtggcatcctcaggtcagcgagtcgggtgtccatcggccccacgtggctggcatacacggccggagcaacgacggagcgtactccctagtcctggcggggggctatgaggatgatgtggtgagtgtgtgtgtgggaggggtgggggagggttgctctagttttttggatggtggtaaaatacatagaacaaaatttcccatcctagccgtttttaaatgcttggttcccggtggcgtgaagtatattcccattgctatgcaaccatcaccaccaccatctccagaactttctcatcttcccaaactgaaacgttgtctccacgaagcactcactccccaccccctcccagtccctggcaccgcccaacctggttcctgcctctgtgactctgacgactctggagacctcctgggagtggaatcgcacggcctgcgtccttgcatgcctggctcctctcactgagcccgacgtccttgctttgtccatgttgtcgcatgtgtccggattccccttttgttcacggctgagtcctattctgccgtgcggagggaccatgctgtgttgatctgtctgtccgtgggcactggggttccttcccctttcgactgctgtgaatagatctgctacgaacacggctgtacaagtatctccagcccccgttttccattcttttgggtgtatatccagaagtggaattcaagactcctgtgataattccatgttgagtgttgttttttttttttcttttttttgagaccgagtctcattctggctggagtgcagtggtgtgatcacagctcactacagccactacctcctgggctctagtgatcctcccatgtcagcctcccaagaagctgggactacaggcaggcactgccacgccaaactaatttttgtatttttttgtggtgatggggtttcgccatgttgcccaggctgatctcgaactcctgggcttaagcgatcctcccgctgcagcctcccaaagtgctgggattacgggtgtgagccaccatgcccagccctctgtttaagtttcttgaggacgcaccacactgtttgtatagtcgctttgccattctgtagtcccaccaacagtttacaaagggctccaatttccccacattctcaccaacgcttgttattttctgtttctttgaaagtagccatcctggggagtttgctttcaatgcagtctctttttttttttttgcctctgcagagggttcacccagccttcttgtctgtttcaggaccatgggaattttttcacatacacgggtagtggtggtcgagatctttccggcaacaagaggaccgcggaacagtcttgtgatcagaaactcaccaacaccaacaggtttgtggaatcagccttcttatttccttgctgatgcatatctgccgagtcttggttctgttttgggcctcatgtccagcaagtgatagtctcattaggagcgtggtagaacatagcgaagcctggcatttggttcctccctctgtctcccaaagtgctgggattacaggcgtgagccactgcgcctggtctggttcctcccgtatgtgtgccacataccgtgagccattcagatggatgaaagcaaacttccctataaaaggccagataatagatatctttttttttttttttttttttttttttttgggcagagtctcgctctgttgcccaggctagagtgcagtggtgcactctctgctcactgcaacctctgcctcctgggctcaagcgattctcatgcctcagcctcctgagtagctgggattacaggtgcttgccacctcgcctggctaatttttgtatttttagtagagatggggttttgccatgttggccaggctggtctcgaactcctgacctcaggtgatcttccctcctcggcctcccaatattggtattacaggcatgagccactgcgcctggctgatagtaggtatcttaatgctgggcctggtggctcacgcctgtaattctcgcgcttcaggaggccgaggctcgaggataccttgagttcaggagttcaagaccagcctgggcaaggtagtgagacaacccatctacaaaaagtaaaaataaaaaaattagctgggtgtgttagcatgtgcctatagtcacagctagtcaggaggctgaggcaggaggatcacttgagcccaggaggttgaggccgcagtgggctgagattgcaccactgcactccagcttgagcaacagactgagatcttgtcaaaaaaaaaaaaaaaaaaacccctccaaaatagattgcttcagctatgcaggtcacacagtctattcagagaacctcttcagctcttgtgtcgtagcacaaaatcagccatagaccatatgtaagtgagtgagcatggctgtgtttcagtgaattttatttgcaaaagtatgtgataggccagaatttgcttggcccctgattacaggatgggggcggacttttccagcataaaaaccatcataaagcccaaaggaaaagacagatttgattatctaaacattataaatatattacataaataaatcctataaattaaaaggcagatgactaggaggagttcttgacatgacacatgatgatagtgtctttatcatataaagagctgttgcaaatcaacaagaaactcatagaagagctgggtgcggtggctcacgcctgtaatcccagcactttgagaggccgaggtaggtggtggatcacctgaggtcaggagttcaagactagcctggccaacatggtgaaaccctgtctctactaaaaatacaaaaattagctgggtgtggtggcaggcacctgtaatcccagctacttgggaggctgaggcagaattgcttgaacccaggaggcggaggatgcagtgagccgaaatcatgccattgcactcttgcactctagcctgggtaacaggagtgagactctatctcaagaaagaaagaaactcgtagaagaaagcaaagaggccaggcgtggtggctcacgcctgtaatcccagcactttgggaggctgaggtgggcggatcacgatgtcaggagatcgaaaccatcctggctaacatggtgaaaccccatctctactaagaatacaaaaaaaaaaaaaaaaaaaaagcctggtatggtgacaagtgcctatagtcccagctactcgggaggctgaggcaggagaatgtcatgaacctgggaggcggagcttgcagtgagccaagattgctccactgcactccagcctgggtgacagagcaaaaaaaaaaaaagagaatatggaaataatgcacaaaagaagtgcaaagttgtaatcaaatacaaactgaggctgtggtgagatactatttgtttcccctataaagttggccaaaaattctaaaatgttgacataggtcaggggtaaaatagcattccactgttggtagaaatacaaattggaaccatctttctggaaatctcttctgcctgtttgtatgaagagctttataaatgatctattcttgtcactctaactccgctttgaaaaatgtctttaggagacctctggctaggtaaaaatgtaagatgtaatgtttttcataccattatctaaaacaattggcacatagacacacacacacacacacacacacacacacactctcacaaagtcagtaactaagtacctaaaaaagacatgggccatgggtggtgtgtcacatgcctgtcgttccagtactttgggaggctgaggtgggaggattgcttgaggctaggagtttgagacctacttgtgcaacataaaattatgaaaaattaaaattacaaaaaagaatttcaaaaaagttagctggttatggtcgtgtgggcctatagtcccagcttgggagccggaggtgggaggatggcttgagcccaggaggctgcagtgagtaaggcgtgatcatgccattgcattccagcctgggtgacagagtgagacaccctttctctttttgtttgttttttttttatatgtgtgtgtgctttgttttgttttttttgaggcagggtctccctctcttgtccagggtggagtgcagcagtgtgatcgtagctcattgtagcctccacctccttgggctccactgatcctcccacctcagcctccagagtagctgggactataggtgcatgttaccacgcctggctatttttttttttttttgtggagatggggttttgccacgttggccaggctggtcttgaactcctgggctcaggcaatcctcctgccttggcctcccagagtactgggattagaggcgtgagccacggcacctagcaaccctgtctcaaataaatagtaggctgggtgtggcctattttataaattatacatatataactttgaaatattaaatttttttttttttttgagacagaacctcactctgtcacccaggctggagtgcagtggcataatctcggctcactgcaacctctgcctcccagactcaagcgattctcctgcctcagcctcctgagtagctggaattacaggcacgcgccaccacgcccggctaacttttgcatttttagcagagacggggtttcaccatgttggccaggctggtctcgaactcctgacttcaggcgatctgcctacttcagcctcccaaagtgctgggattacaggcctgagccaccactcccggctcctgtgtttccttttttggggggtacatcctcacctataatgcgtggggtcctgactctccctgcagggcgctggctctcaactgctttgctcccatcaatgaccaagaaggggccgaggccaaggactggcggtcggggaagccggtcagggtggtgcgcaatgtcaagggtggcaagaatagcaagtacgcccccgctgagggcaaccgctacgatggcatctacaaggtgagtgccccttgaggaggccgggggctctgtccccgccggggctgcctctgatggagctgacgctgatgcccgctctctgcaggttgtgaaatactggcccgagaaggggaagtccgggtttctcgtgtggcgctaccttctgcggagggacgatgatgagcctggcccttggacgaaggaggggaaggaccggatcaagaagctggggctgaccatgcaggtgtgtctgggatgggggatggcactttgggaggccaaggcggatggatcacttacgttaggagttcaagaccagcctggccaacatggtgaaacctcatctctactaaaaatacaaaaattagctgggtatggtggcgggtgcctgtaatcccagctactgaggtggctgaggcaggagaattgcttgaacccagaaggtggaggttataatgagctgagattgcgccactgcactgcagcctgggtgacagaatgagagtccatctcaaaacaggagcactgccgggctccatgacggctctgacacttcccgcctgggcaccatgtgtcctgcttggaggctgtcatccttgaaggtcattgtgggtcacagaatgggccctgcctgggcttgtggtgctcatgttctggaccgcgctgaacactccaggaggcctcccgtctcgggcccatgcttccctggtttctctctgatccagaataatttccagggccccagctgatggcacccccctagctgtcccatataaatcctccagccagggggtgatgggaacgcgcagatgacatttgcttctccgcctgccgcatctcagagttgaaaaccagacttgcttgtcttcgttctgttggtaaagggatcgctgcagaccagtcaggcatctggtgtcttctgttttcacttcttggctcatcacaaaaaaaaaaaaaaaaaagcagaaacaaaccaaccaaattggtggattccagagagatctggacggaaaaatggggaagatgaatatccccgagccatctctcacctccctgtggcgatgggaactgccgagaacttactcaacaagcggcgcagcatttcagcaccagttaggatgtggtctgtccattgcagggagaagctttacagcagacgaatcgtgagactatttaaggaatcttaattgctgtcgagagcctgatgtcctctacccgagggggtcactcaggttgtcttttgaatggatttgtacggtggggaatttcagaagctgaggaagtagagagaaaaatagtaatgggagagacagcctcagcttctgttgggagtaggattttttttgtttgtttgttttgagatggagtcttgctctgtcgcccaggctggagtgcagtggtgggatctcggctctctgcaacctctgcctcccaggttcaagccatactcctgcctcagcctcctgagtagctgggattacaggtgcccaccaccacgcctggctcagtttttgtatttttagtagagacggggtttcaccatgttggtcaggctggtcttgaactcctgacctcaggtgatccacccgcctctgcctcccaaagtgctgggattacaggcgtaagccaccgctcccagcctttttttttttttttttttggagacagagtctcactctgtcgcccaggctggagtgcaggcatgatctcggctcattgcaacctccacctcccaggctcaagcgactctctcatctcagcctcctgcatagctgggatcacaggtgtgtaccaccatgcccagctatttttgtatttctagtagagacggggtttcgccatgttggccaggctggtgacctcaggtgatccacctgcttccacctcccaaagtgctgggattacaggtgtgagccgctgaccctggccaggattttttttttttttatgactctcatctccattgtaacataaagaatgtgaaaggagctcaaagatttcctgagacactggagagtcagacgtgacttataggtaccttcgaaatggagcgatgatgccctgtgaggacagagagggcccgagtcctcagaatcaccagagtttggccagctaaggccctggggtcaggtgttcgtaagtgaagtttctggggaaacagtcatgctcattcactgaagtagcctgctctcagcgcttgcagtccagacccataaggcttgaaaacattcaccctagggtccctggaagcaaaagtttgcctgccctcatggaaatcgtaaagacaacgagatcttattggtgggatgtgatgctgaacacgtcacccgcgttcgctcacattaaatgcgcttaccccgaccctgccaggtggagcttggccgattatctcctcttagtctcctcttgttcgtagtgaagctttgcgattagacaggattagccattggtcgaggctccacagttaacgaagagctgaatgcacaggcgtcccccccttaccagggggacacttcgaaggtcctcagcacatgcttgaaaccagagagtaccaaaccgttgatgtataattttttttccatacgtttggactggtgattaagtttaatctataaattaggcacagtatgagattcacaacctctctttcgcatcttaggcttctctttagcatttccaaattgtcagcatccctactcttgcactttggggccattatttttatttttgagaccaggtctcgctctgttgtccaggctggagtgtagtggtgtgatcatagctcactacagcctcaaactcctgggctcaagtgattctcctgcctcaggctcctaagtagctgggactacagatgcacaccaccaggctcggctaattttttaaatttttttgtagagaggggatcttgctatgttgcccaggctggtctcaaactcctgggctcaagcgatccccctgccttggcttcccaaagtgttgggcttatttaataaaaattagaatgtttaatattaatattttatatttagcctgtaatcccagcattttggatgactgaggcaggtggatcacttgaggtcaggagttcaagaccagcctggccaacatggtgaagccccatctctactaaaaatacaaaaattagctgggtgtggtggcgggcacctgtaatcccagctactcgggaggctgaggcaggagaatcgagaagctggacaaagggaaggttcacatccctgtgggacgatgcaatgtttcatcatgcagtgtgcgtgatgtgaggtggctgtaaagggggaggaaggggccccgagccgagggatgcagcgcctctagacgttggacacttagaacagtgtgcagtttacaacttaggaattgtttctagaatatttcatgtaacattttcagttgactttgggtcactgaaacctcagcaaaactagataagggaggactaccctgtgctcttcagggggattgggggtcaggtgtgtctggaaacccagacctggcaaggaggctggaagagcgggctctgcatagcgtgtgggccccaagcctgactcacggctgtccctcttcctcctgaagtatccagaaggctacctggaagccctggccaaccgagagcgagagaaggagaacagcaagagggaggaggaggagcagcaggaggggggcttcgcgtcccccaggacgggcaagggcaagtggaagcggaagtcggcaggtgagaatctcgtgggtgtggggtgagcgtcttgtgtgtgggggagcaggtgggcatctcgcgggtgtggggttgaggtcgtgtggacgtgggagccggtggctgtctctccggcagctcgggccacgcgcccctccctcacgcgccccaccctcttccaggaggtggcccgagcagggcgggtccccgcgccggacatccaagaaaaccaaggtggagccctacagtctcacggcccagcagagcagcctcatcagagaggacaagagcaacgccaagctgtggaatgaggtcctggcgtcactcaaggaccggccggcgagcggcagcccggtaggctcgcacggctcactcgtcgccctgatttgcgttgactgcggtaaaatgtgtggggcttgtttcccatgttccccattttcaagtgtacagctcagtcgcactgagtacattcttgtggttgtgcaaccatcaccaccatcaccacctccagaactttatcctctccccagactgaaaccctggccctgaaactgtcactcccaccccctcccaagccttggcactcgctccccagccccggcaactgctccccagcccctgcacccgctccccagctccggcaccccctgccatcctaccttctgtctctgtctcccggggctgttgcaaagtgaccccaagcctaggagtgcaaagcgactcacatctcacagctctggggctgggagcccgacatgggccttgctgggctaaagtcagggcagggatagggctgggccctcctgggggctccaggggagaaccagatttctgcctttcccaaggtctagaggcactgtatccctcggctcggggccccttcctccccctttacagccacagcgcatcttcttccagtctctgagtctcactctcccgccctctctcgggaggacctcggggtgacatcaggccccccgcctcacccaggatgctttcccagctccaggtccttcactcagtcccacctgccatttctcctctgctgtggatggtgacgtctcaggatggtgcaggtctcaggattcagctgtggccgaggccatctcagtggtccctctcttcccatttccttcaggccacattcttcccagggctttctccccagctcccaccctacgctggggcagccccttgcccctagaccttcacttgtgtctctttggtccccgcacttagctccaagcaggaggaggtgtctttcgagtcatccgaggctgggctcctggtggcccgtgtactcagtatgcattgtgtcagtggacaccatgcctctaaatttttttggtgacaggagctcaccctgtcacccaggctggagtgcggtggcatggacaaaggtcactgcctccttgaactcccaactcccaggccacgcctatgtttttaatttattttgtttatttttattatttttttttgagatggagttttgctctcgttgcccgggctggagtgtgcaatggcatgatcttggatcactgcaacctccaccttccaggttcaagtgagtctcctgtctcagcctcccaagtacctgggattacaggcacccaccacgcctggctaatcttgtatttttagtagggatgggatttcaccgtgttggtcaggctggtctcgaactcctgaccttaggtgatctgctcacctcagcctcccaaagtactgggattacaggcgtgagccaccatgcccggcctattttttaattttttgtagagatgggggtctcactgtattgccgggctggtcttgaacacctggctcaagcgatcctcttgtcttggccttccaaagttctgggatgacaggcgtgagctgccgctcccagccaggaacctctcctaaagccctgtcttgactcagtgcagggtgtgcttggtggtgccagctggtcatatctgggtcctgcccagcatcattgaggctggcgcccttgtactggctccgcctcatcctccccaccttgccacttggggtgttggggacttcaggtgaggctcatgcctgttgggcctctgtttttctcagaacggggacgatcatggcccccgcctcctggagtgaaggctggggacagaattagaggacccaggtacatgctcagcaggaagccactgatctgtgggagccctggtcccggtgtctttgccggcctcacacccgcttccctctagttccagttgttcctgagtaaagtggaggagacgttccagtgtatctgctgtcaggagctggtgttccggcccatcacgaccgtgtgccagcacaacgtgtgcaaggtgagtagagatggccgcgggagccgggtggaaggttctggaaggatgacctgacctcccgttcccacatgcctgccactacagacagaggcttgttggctttgctccgctcactctgcagcttttctcggggccctgttgactgctttctgggcagcctgtattaccacggaggcctataacattctcccccaagtcctgtatggtcaaggggccagggtgggagaggatgggccacagtcttggcctaaggtctggagaggaggtgcacatcccctaggggtcaggaaagaaggcttcttggaggaggtggtgttaccaggcagcatcccttgtacctgggacagcaggtgaagaagcctgggtgggaagtcagcagctggggcctgcagtggctctgggcactggggtggtggcctgccatgggctttaaactcaggacaagtggtcagtcgtaggagggacacaagatcccagctgatggtttttttttttttttttttttttttttctgagacagagtctcgctctgttgcccatgctggagtgcagtggcgcagtctccactcactgcaagctctgcctcccgggttcacgccattctcccacctcagcctcccgagtagctgggactacaggcgcccgccaccgtgcccggctaattttttgtatttttagtagagatggggtttcaccgtgttagccaggatggtttcgatctcctgaccttgtcatccacccgccttggcctcccaaagtgctgggattacaggtgtaagccaccgcgcccaccccgcagctgatggttttcaaaccgattggtttggggccaggacagggtctcttcccccctgtgctgtgggccttggggctggatcattgtctggggtggggccgtcctgggcactgcagggtgctgagcagcatccccggcccccacccactccatgccaggagctccctgcctagtcgagacaatcacagacatccccagacaccttccagtgtcccctgggggcagaactgcccaggtgggcagtgtgggtctgggtgatggtttctctgctgcaacctctggccagagccggcagtcccggtggacaggtgtggaagggactgaccctgccaccccacggatctccccaggcttctgagttgctggcggttttccttccaactgcagtcccgcagtcctctcagccatgggccacacccccgggtctcagaccccgtgtttgttttcatgccaggaggcagctcagggaaggtcaggagatggggtgttcccagtcatgcccatggcatctctgcctcctcgggccccacctgcctcgccctgtggcctgagtcccttcagctgtgtgggcctccctgagtgccctgagtgaggtggcagaaggggtgagaggccatggtgtctttggggctggtggtccgggtctggccatctgtcacctctcaggcgtgcaggcactaatccctccaagcctcagttggccacagtgagaaggggcctggtaacactgtcctggatgccaggttgttgtgaaggtcccggcttagcctctggcaggaaggaggtgctcaggaggtgggcacaggcagagggctggctgtggggggctattggaagagggaggcctgggagccccgtggcggtaggaaggactgtggggacattggaaaccatctgtcctgtgcatcggtgtgaaggcgcggaagcgctgaggatgtgaaggaaggggctaaccagcatcacggtgtccccacaatctgtccttgttgctctgttccaacttgggaagctcagcatcggaggggttctgggaaacaggctgtgaccttccaccttgatctttttaaattataaacttgaggccagccgtggtggctaatgcctgtaatcccagcacttggggaggctgaggtgggaggatcacttgaggtcaggagtttgagaccagcccgggcaacatggtgaaaccccatctctactaaaaattaaaacaaaattagctgggtgaggtgacaggtgctactcaggagactgaggtggtagaatcgcttgaacctgggaggtacaggttgcggtgagctgagatcgcgccattgtactccagcctgggcgtcagagcaagattctgtctcaaaaaaaaaaaaaaaaaattgaaaaaaacattcagagacagcatctcactctgtcgcccaggctggagtgcagtggtgccatcatagctcatcgcagccttgaactcctcgcggggctaaagagatcctcctgccttagcctcctgagtagctggggctacaggcatacaccaccatggccaacatgatgaaaccctgtctctactaaaaatacaaaaattagccaggtgtgctggtgggcgcctgtaatcccagctactcaggaggctgagacacgagaatcccttgaacccgggaggtggaggttgcagtgagccaagatcacgccactgcactccagcctgggcgacagagcgagactctatcttaaaaaaaaacaacaaaaacaaaagccacaggctgcctggggcaggtgactgtgctgtggtcaccaggcctctcccccatgtggtcaccgccctcgcccagctgtgtgacgacatgctgcagacatgtgccccctgcgtaggcatctgtgcacctgtgtacggcgtgtcactcctccctggcgtgcagccagcccggtggcatcttccctgtttgtctgcttgggaagtggagactccaggcctctcagctctgtcttctcctggctttcttccccaggcacgacttggttgattgagcttgaagttaggaatctgaatccaccagacttggttccttcctccttttcccctttcttctcattgacgtgtatgtttattttttatttttttcgagacaaggtcttgctttgtcgctcaggctggagtgcaatggcgtgatcatggctcactgcagcctcagcctgcctccctgggttcaggtgatcctcccacttcagcctccggagtagccacgcccggctaatttttttgtttttgttttttctttgagacgcagagtcttgccctgtcacccaggctggagtgcaatggcgtgatctcagctcactgcaacctccgcctcccgggttcaagccattctcttgccttagcctcccaggtagctgggattacaggcatgtgcctggctaatttttgtatttttagtagagacagggtttcaccatgttggccaggctggtcttgaactcctgacctcaagtgatctgcccccctcggcctcccagagtgctgggattacaggcatgagccacgatgcttggcctgatgtgtgtgtttattaagcatctactgtatacactgtgcttggtgttgagagagaacacagcctcaaagctcagggagcatctgccctgttgtagataagataagcacattaataatatataacacggctccacaggtggaaggagaggtgccgtcttgaaggcagatggggtgaggggatgggactgcctctagggaggtgtcagggaaggccccataagggaggtgacttgagctgagctgtgagtgatgagagccgggggaccgagctgttaagctgcatgacctgccagggacaaaagcctggaggccgggtgagcttggaatctttgagggcccctaggggggccaggctggtgatgggcagcaggtggaaagtgagactgaaggtcagaggggcctctggacctggtgagactgtccccacagtcctgggagaggtggccaggagcaaacctgatggtgtggatggcacttctcacgcgcctgctgtgtcttacaggactgcctggacagatcctttcgggcacaggtgttcagctgccctgcctgccgctacgacctgggccgcagctatgccatgcaggtgaaccagcctctgcagaccgtcctcaaccagctcttccccggctacggcaatggccggtgatctccaagcacttctcgacaggcgttttgctgaaaacgtgtcggagggctcgttcatcggcactgattttgttcttagtgggcttaacttaaacaggtagtgtttcctccgttccctaaaaaggtttgtcttcctttttttttttatttttatttttcaaatctatacattttcaggaatttatgtattctggctaaaagttggacttctcagtattgtgtttagttctttgaaaacataaaagcctgcaatttctcgacaaaacaacacaagattttttaaagatggaatcagaaactacgtggtgtggaggctgttgatgtttctggtgtcaagttctcagaagttgctgccaccaactctttaagaaggcgacaggatcagtccttctctcgggttctggcccccaaggtcagagcaagcatcttcctgacagcattttgtcatctaaagtccagtgacatggttccccgtggtggcccgtggcagcccgtggcatggcgtggctcagctgtctgttgaagttgttgcaaggaaaagaggaaacatctcgggcctagttcaaacctttgcctcaaagccatcccccaccagactgcttagcgtctgagatccgcgtgaaaagtcctctgcccacgagagcagggagttggggccacgcagaaatggcctcaaggggactctgctccacgtggggccaggcgtgtgactgacgctgtccgacgaaggcggccacggacggacgccagcacacgaagtcacgtgcaagtgcctttgattcgttccttctttctaaagacgacagtctttgttgttagcactgaattattgaaaatgtcaaccagattctagaaactgcggtcatccagttcttcctgacaccggatgggtgcttgggaaccgtttgagccttatagatcatttacattcaatttttttaactcagcaagtgagaacttacaagagggtttttttaaaatttttttttctcttaatgaacacattttctaaatgaattttttttgtagttactgtatatgtaccaagaaagatataacgttagggtttggttgtttttgtttttgtattttttttcttttgaaagggtttgttaatttttctaattttaccaaagtttgcagcctatacctcaataaaacagggatattttaaatcacatacctgcagacaaactggagcaatgttatttttaaagggtttttttcacctccttattcttagattattaatgtattagggaagaatgagacaattttgtgtaggctttttctaaagtccagtactttgtccagattttagattctcagaataaatgtttttcacagatagacttgattgtgtcttcctatttgcaaactgcctttggagctttctgtctacttttgtgcactattttacaaaaatcccaggagaaacatgaggcaggtggcttcagccccactttacagatgagaaaactgagacccaggagatgacggtgacgggctgaggtcctaaccgcagcctgggaggtgctgggctgttcactttgcagcgtcaagttgcaggggtcagcaaacgacagccaatgggacccaagtcaggacactgcctgtctgtaaataaagttttattgacaccaccacacccatttctttatgtatatagtggcgtttacgctaccatcagcagaactgagtaggtacagcagaaaccatctggaccacaaagctgaaaaatactcactgcctggccagcaaagcttgctggtctcttctcttgggaggatgacttgagtgtaggagtctgagaccagcctgtagaccccaactctacaaataaataaaaatattagccaggtgtggtggtgtgtttctgtagtcccagctactcaggaggttgaggcaggaggctgattgcttgagccccagagctagaggctgcagtgaactttgattgcaccacggtactccagcctgggcaacagaatgagatgctgtctttaaaaacgttttaaaaaaaaaaaatcgggacggtaaaggggctgcgtcttgcagattaattaattcacatcaacctattactggtgccttttattgatggttaagtaaccatatgggcagatttgttttgtttttgagacagtcttgccctgttgtccaggctggagtgcaatggtgtgatcacagctcattgcagcctccaactcctgggctcaagtgatcctcccatctcagcctcccgagtagctggtaccacaggcatgcagcaccataactggcaaatttaatttttttttttttttttttggagagacgggatctcattctgttgcccaggctggtctccaactcctgtgattaggcgatcctcccatctcagcctcccaaagtgctgggattacagacgtgagccaccacgtgcagcctggagtttctttttgaggtggtaaaaatgttctaaaattgatggttgcacatgtctgtggatatactaaaatccacagaattgtgcactttattttttatttttattttttcctttttttttttttgagacggagtcttgctctgttgcccaggctggagtgcagtggcgtgatctcggctcactgcaagctccgcctcccgggttcacgccattcttctgcctcagcctcccaagtagctgggactacaggtgcccgccaccacacccggctaatttttttgtatttttagtaaagacagggtttcaccgtgttagccgggatggtctcgatctcctgacctcgtgatccgcccccctcggcctcccaaagtgctgggattacaggcgtgagccaccgcgcccggccagaattgtgcacttt

SEQ ID NO: 656 - DNA, 82976 bp, Homo sapiens
  source 1..82976: mol_type = genomic DNA
ctggaagaattcttgcactgtaggagtgaattcaacacaagtcacagccagcttgctccatcttaaaggcgaggagccccagccccaagtcctgagctcttgccaacctgttcgagaccacacattgaccctggaagaggaggagcaggtaggctgggatgtgcccagggactttctgaagcctcaatcatcccagttatgacctccccctgcccctccttgcagcatccctcttcattcctcgtggagaagtgtgggctccatagaatgaactggcaagtgtgcactgtgtggatggctctgagcagctgccaccacctggggtagcatgggcaaggcagacgacacagagtctccagccagacccctattaccagctgcctggcctgggactagctatgtcacgtctccctgcctcagtttcttcatctgcacagcgaggataataacagtgcttacctcttaggattaccatgaggctcaaagaaggaaatgcagagaaagtgcttaggacagtgctggccttgtaggaaagactcacaaatattcattgtttcgttgatgagagcaagaagtgcgcttgttacatattcacccaatagtgtggggtggaggaatgaggtacaggtggataccctcttggaggacctgctagcgtcttacttcctctgtacatggatggcaacacagaggcagaagtctcaagttaacttctttttcgtttcaaagcatctcatgacatttaatacccctgcactcatactcgcccggaagtgtgagcttggttcatcactaatggatattttcagccctgctgaggaatctgggcctgctccttgcctccctcaccttcctctgcagcccatgtgaattagcctgcttgcctgctcagggactggtccccgcagtgtggctcctggggccccagcttcactccttcaagggccaggatgttgaagaagggggaaagggacccctacactagcctgccttgtgtggcccaaagacccttgccaagatcaggtgggggtcaaagtgcaggaaaagaaggatgtcgatttcagaagaaactgttgtgggaatggcaggatggctccagcgtcagcgtgccttcctgcagctaccccggggccgcacgccagcagctcttggcagcagtcacacggctctcgcatccaacctctgccacaggggagcaggcctcacttcccccagctttgcttctctgccctgcagggctcctttcctgtcccagggagctctactttccaagcagttccatggccaacagctggagtcttattttagggacgagctggcagcccagcatttgtactgaatgttccgggtcggcctggcccgcgcctggtgcaccagtgggaaccccataagtctgggcttgggggagtgaattacttctgaggtttgctgacattctgtttggctgcctgaaatgctttctcttcattcaaagagcagctgctggtctccgcccctctgtctttcctttctcctcccggtggcttccctgttcctgtccctggctttcctggctttttggatccccatcctggctctggggggaaggaggatgggtctggagcacctgtgagacccgagcctgggcccaccacagcagaggatgcagcctcccaaccccaagagtcccagattggagtccctgagagaagctggggtaggtgaagtgggctctcagtctgggtgttatcttgggaggagcgtgggtctctgggacacactggtaagatgtgctccacttgaccctcatcataaccaagggtctgttggtgggcttttgcctttggtggccccagggcccctgccttctggctactgccatccgtgggggatgagtgacgtcaaacttccccttctccgggctgttggctagagtgggggcagtgggaaaaacacatctatcaggcagtcccacccctgcacaaaggagcagagactgtgcctcagccccacatccctgcctggtgggtaccacatcacagacagacacgttcttagctggctgtgtgcagtcactgccaccttgggctcctgggaggcaccaaaggcccattgtgggcccctgaaatgacgcacccaccacagtcagctgccatcatgcaaggcaccgaatctgctgtcctggtgggatgggatctcacttctgcctttcctgttcagcctccccgggctccatgcgctctgtggaggccatggcaggatatgttgtgggcagctggatttccggccctctctggtagagtcagaggggttgcctttgaccagcaggaaagggattcgaaggcggacgcgagtgggccctgcccaactcagactgaggaggaagtttctgcagcgccggaaggagaagcaatgaatagccactgtctagaccctcccctatgactccatccccaaggtgctccagacaggcctgagattcccctcttccttcctagccacaccacccctggtgtgagccaggcaggcagcccagccctctccagccccggctcctggtggcaggaggtgccttcctggctgtagcaggaagagtctccaggttatatggccgtgtccctgtgccaggactcggggtaggggtacactctgttctgacccccccaggaagtgagttccaaaggagtcgggcctttggaggagaacttggtggctgtgcttttgacctggcattgcaggagcataagccctggtcaacttgagcgaaaaagccggacccactgtcaccatctcacaggctgtgtcgcatgctctggcggtgagggcctgtttcccagccctccctagcaggagactgctcagggcagagctcctgagatactatgggttcctttggggtggaagagcctgtggccaggtcagtgaggagaacagagtgggagcatgagggtgggctggagaggagctgtttgtcccgcctcccgaccccgaggagggcatagtccacaggctattttagggagcaagaactggccagtcagaatgtgcctgcgcctctccccaagacaacagcaccatcaaaggggaacatctttgtcttgggggagccatgtggaattgtacctagaacagattgtgaacaggggtgcctgtcaatttacatttatcaggactcgtttcttttccctcccagacttgccctgcaaatctcatggtggggtggggatcaaggagaagagggcttatcttgactttcatgatcttagtgttaatgacagttacccaggatggaggtttttagcccctttcttggccctagacccaatgaccccttccatgatatttttcaaagtccagtgaagcagtggagagaggagtgagggggaggagaagagagagacgggactctgttggcagacgccctgctgtcttccaagaccctatataggcttctgtggagttcttgcagctgaaagctgagtcctttgcctggggcaggggtggtgtggattcttggccatcacactcctggaaccctgaatcttactgttccacagtcacagaccagccaggctcaggacctcagagctgcttgtgggcccatggaaagtcatacttgcttcccgtcggcgctgggcctgctgtcattttgcagcttctgccctgcaaatttagagttttagagtttagttttagagttttaagtctctaaaaccctcacagttaattttttctcttcctttaatgacacccaaaagggcacccagcattatgcctcgggtgtttgacccggctggatatgggatggagagcgtttggtgggtcctgggaggagctcaggccaggtcaggatttaccattgttattgatgctacagataacagccttgccctgaaggctttcacagagtttatctcctttcttgttactctgatagggctgggattgtccaccacctgctcaatgagggctaacattgagtacccagcgagagtgctgtattaaatcttatcttggccaggcactatggctcatgcttgtaattccagcattttgggaagctgaggtgggaggcttacatgacctcagtttaagaccagcctgggcaacatagtgggaccctgcctctaccaaaaaaaaaaaaaaaaattagccaggcatggtggcacatggcacatgcctgtagttcacctactcaaaatgctgcgatgggagaatcatttgagccacaagaagccgagactgccatgacccatgattgtgctaccatactccagcctaggcgatagagtaagactctgtctccagacaaaaaacaaaatctcctgcttggtggagacctctcagagtgctggggaaggggctccggagtccataggctctattctcctctcccttccctcacttcctggctgtgtgagtttagctatataaaattatctcagggttagttttagaagccaagatttgcatgttaggccctaaaaaagattgcattttcaaaaggcagtcacatcaacctacaaactctctcatcagcttttcttgtagtatggcttgacacccctccactgagaggtgagctctctgttctcttccctgagacctgcttccctcagtagactgtgatggaggtcaccttatgtgactcgaagctgtgtcataaaaagtgatacagatcacagacggcgcctggcccgcagtctcttggttttctcactctgtgggaagccagctgacatattgcgaggacactcaagcagccataaggagtggccgacagccagtatgagggactgcagcccagccctcaggggattccagccagaaatgcctgagtgagccaagacccacagaaaccatagaaatgttaagtcattgctgttgtcttcagccactgaattttttttaattttattttttatttatttttatttttttacttagcatgatgccctgaacaggtccatggcaataagaagaaatcattattgccttactgaattttagattataggcagacagaaacttcctaactcaattgctgagcctcatgctttaatttacgaataaaatttctgttgtgcccattgaccatttaggtatcaacttctaagggttttttcttgttttgttttcttctgagaccgagtcttgctctgtcacccaggatggagtgcagtgtcttgatcatagctcactgcaacctcagcctcccgggttcaagcagttctcctgcctcagcctcctgagtagctgggattacaggcggcactaccacgtctggttaatttttgtatttttagtagagatggggtttcaccatgttggccaggctgaactcctaaggtttttgaatgtggctctcctggctctgctatcactggaagtaaaactgagacaaaaaacatggctcctcacctactcttcagcatacctgggcacctggacttcttatttacttctctctgcttccaaacaggaagctctgtaaacaagaagaaagggactgaggacccacagggttgcctggacatttggaaaataattttaaatatttacacttgatctataggagattacacatttgctatggaaagcttcaattattaaatgatcaggttcactagagtaaaaacaattattctctgctgagaaagtattttatatttctactttaaactttgctctgttctggttgaatgtgttagaaaggaacacttgtgcttattaaaggaaattgtcagaagaaaatgaaggggttgaaatggaaggatgtccttggatttggagttccaatgaaagaacataagtgctggatgcaaacttctagttgcgtgcacatctctgggcagaaaggagtttggtgctaagtgcaggtggaaaagggacttctatttcctgattggggtgactagaccattgtgagtgtgtgttcatccatattaccagtgcatgtattcactctttaccctcttcttcatgggtttccagcctctgctgcaggccaccgtggccctgggatggagttctgcacagaggatgtgggcggatgtggcagctttttaaattctctgtgtcttccttcaggttctctcctctcatttgctggacagacaaagagggcctggagacctccgaggatatggtggtgacagggccactgaggagggcaagtctgagtccctggaggtttgtgtggatcactctttcccccaacctatggtacactgggacaaagggataaacaaacttatagcttattagatcattgagagttaagagttgttttcataggtgttaactcatcttggctaatatacctacaaacaccttggggacaggggcacttgttagtgttccttgtctttgcagagtctagctggtaatgggcacaaagctgtttatagaatgaataaatgagagataaatgtgtctttacttggggcagcatggtgctctgcttttctttccttttgttttcacaagatgatggaaaaagaaagtgctggggtcaaacactgctatggtctgatggtgtcccccctaaaattcgtattaaaattcatatgatgaaattctaaccaccaaagtgatggtgttaggatggtgttagggcatttcagaggtgatgaagtcatgggcgatgaagcccttatttatgggattactaccattgtggaagaggccacagtgctgccttcccccctctaccatgtgaagacacagtgagaagtcatggtctatgaagaaggggccctcaccagtcactgaatctaccattgccttgctgtgggacttcccagcctccagaactgtgagaaatacatttctgttttttaagaaccacctagtctatggtattttgtaatagcagccgaaatggactaacatagcactctaaatagaaaaatggagacttcctagctcttagcatcttcttactcatttacagaagaataaagtcatcaagagtcattgatgccagcattgccctggagggaccaagggaacaggaacttgttttccttgtgtttgcctttcctcaaacctatcctgtagctgcatctgatggtcagagtggtatcatcttaacagttatgcctaattgttttcataaataatcatatttagtaggaaaagaatagctgagtcagaaagttttatataataatgtcctttagttgactgtgttcttggaaactctggttgttcagaattgcagacaaaaatcctatctcaccgggaaagagcctaggtcaaaatgaaattccacattagtgttaaatttgaaaacttgaagtgaacacaagcatattgtattagtctgttctcacactactaataaagacatacccaagattgggtaatttataaaggaaagaggtttaattgactcacagttccacatggctggagaggcctcacaatcatggcagaaggtgaatgaggagcagtcacatcttacatagcagcaggcaagaaagcatgcgcagggaaactccccttaataaaaccatcagatctcatgagacttattcactatcacaagaatagcacgggaaagacctgccctcatgatttaattacctcccatgattcaatgtccctctcacgacacttgggaattatgggagctacaattcatgatgagatttgggtggggacactgtcaaaccatatcacttatcattgaatattttgtgtgtgtatttccaaaaaggtactaaattgtccctcccccatgcataaaaatgtaactccaggtactttcacctccaggctgcatgagcctgcttagaatcagacaacccacgaacatcctccatgttcaactccacacatcacaggtggctttcattgacagccaacaaccaccatgctttattgaaaaaatataggaagagaaacatgcaaaatgccgcatggtacacaaggactggaatatgtttttagaaactcgtgcgtttcttattagaacataacaagtagattttcgactccttaaataactttattatggatcttcctgtcaaagagggagttttaaatggagatattgataggctcaattatttccatatggtattagattttccttcattgtagacctggctatgtgctgtggtcagcacatttgtacctgcctacccttagatggattttgctagatttagtggctacaaacacccaattttcatgagtagattaggaggctctttgaaaaatagggctaaaatcccctacagatggaatccaaaagcatgcttgtgtatttattttgagctaccaggacaatcttgggtatgtccttctatctctgcagtgtacaggctttgacttaaagtttttattgcacaaacaccatgctgtggatgtttgagtctgcaaaggacagagcgggagcccagctgtagcaagctgcattttcattctgaatgtctaggagattagaatttaatgtagttcacaggagttaaagttttcttccaaatcctttgacatgttgtggattgtggattccaagtttatgatcatgtttattagcgccttctgcattcgtgcggcagatttgcctgtgggagaatgctttgccctttctggtggatagacttgtttttctgaggctttgggaggcgggggtagtggtgatgatgctggagaggttgtgttgccccaacttttcttcctccctgtctcctcccaagatgtgggagtcataaaacctgagttaaactgagtaaaaatgcaaaacctcaccgcctaggcaagatgcctcagagcagaggtcctgagacgtcattggggtgggcacccacatggactgatttcagggacacgtgtggtgggttgtggctttaaaacgtagtctgaattctgtgatactcctccagttgagagatggggtcccctcctccaagcccttcgcagttggtaaccccctgactccacagcagccgagcacagggagggcgggctgaggcctggcttggtccatggctctcgtggctctgacctgggatcatctccttggttaaagccttgtcctactgggaggccgaggcttctatctgtcattaggggtataaaggtcaggtggacagttctcggatgagggagggaagagacatagaaagtcaggaggagagggcactgaggagagagctgcccaccccagacccagccaagcgtccccacctaggactccttctgcctgtgcttgtggacaacacagacagacggagctgcacgccccacagcgttttcttttcctgggtggctcagctcctggaagctcatccatctcttgtgtaaggaggaggtctgacaaatgccttttgcttgggaacgtgtgagtctgtgtttgcgatgcaagcctggggccactgctgctgttgcaggctgtgaaacacggagtggctgcaggggtaggggctttggagcttcctctaagaaaaagaaaggcgccgagttcagggctctgggtggcctccagctcagtgtctgctttcatgggatatggtaacatggagagcaagactgtctgtttggaagaagcgagcaaactgtccccacacgtgagagaaaccaggagactcaattccagtcacagggaagtgacctgtcatagccctgagtctgagaaggcgtccagtcagggacacaccaaggcagagcttgggtgtgagaccagagcaggatggactgtcctgtgcaaacacagggatgggaacagagctcttgctgggtgagacttcctgatagaagcacccgggaggcccctctttacatcgttggaccctcccccttgtctgtgctgtgggtccctcatgctgcacctctgtgagtgtagttgctggtatgaaactgtctgggtggtggagtgtggctgcggagagctggagggacagttttgggagagtcagcgctgggggctactttccttgctgtgtgggacccagtgcctggagcatctccttgaagcaaacttttaataaaattctttgtatggtgagctaatcactccttccaaaatgagtctggccggatgtttcccttctctgtctaggaacggaggagcacatgtctctgctgcaatacccacatgttaccaaaaaaaaaaaaaaaaaaatcaaacaaacgtggaactgagttcatgacacttaggcccgtgtgcttagggcaaaggtccggatgcctgtccttgtctttgaagtaggtacacagcacgatggactgatgagtgggtggacagatttgagataaagcaggtatggcaaaatgttcatggtgcatgcacgctgtggagttcaggatgcaattctttccacttttctagatattagaaatgttcatagtgaaacactgggtgatctcagagctgtgaggccccttagggtcacccactcatgtctccattctgcactgagcacactgtcagagcacagtactggagatgggacacctgccctttggaaggtgcatggtgtgtattcttgggaaggacaccctgtggtggaggacgggctgcctcctgcagggcagtcagcagctctggcccccaggcactgactcctgggagaagccctcagtcactgagacagggccagacagggcagatgaggcagtgccaccccaggtcgacaagtgctagtctaggcctggaaggcccagaaagggcagcctgccctggggagggtacacagcatgggagtggctgccgcaacgtagagtctgggagcctgagcccctggctggactttttgttcattctctttcttcttataaaaccaaatggtgcttgagtcagtcatttagggcattgtagcaattctctgctctgggtaccactgaatgtactgaaaatcaccatggtcgtgctttctctcttcaagtttacggaactatgggggaggcggggcggtgtgtgtttggagttgtttttccaggaactgtgacaggtcctgctgattcacacacaacagagaagtatctgatagggctgccaggtttatggatgcagcctgtgaccttggaacgatgtttttaaatctaaaattactgatctaagtagtattaaacctcagactccacctgttcctagtcggagctcacaattaaagtcagttgaccagatttaccatttgtggttaagtcactgtcaaagccacacactccttgggggagtgggggttgcactgtgactgctccagtggccgagagggcctgagctcactgtttccaatgtcaagcctgcgtttctgtggggccccagccattcctcctctacagcaagacccagcccaactcacaggacattcagctactttccattgagagatattttttctttggggaaatttcttgcctcattttggatcaaacttttattttaaattagtggtgagctctaagcatcttggagatcaatgcaggaagcttccccctttgttcttgatattttacatgtacacgaagcaatggaaggtgaagcctgcctgggctcagaatgactgtacagatatggcagtgattttgctgtggctgagggagaccctggggcacaactgtttcccaagttactgcctcagtttacctgaagtgattttaatttggctctgggtttactcatttagatgcactaaggaaaggtttgctgcaatttctggttaaaattggcacatcgattatgtgtgtttttctacattccctctgaatcatcacaaaattatagtaaatgaataggaaaagatatcaatccaaagggatgtggataccagcagatcagacgtgtcaacacaattttggaaaatggaaagtacatggcttagcttagttaatacctgtgtatttagttaatacacaggtattaactaaaacctatgtaccagcaagtttgtgtgtgtgtgtgtgtgtgtgagagagaggggggtggtggtattggtataacaaagaagaaaacctatggttgttccagttactgttgatgcacaacaaactagcccaaatgagaatacacaaagatcattttatcatccccacagattctgtgggtcaggaattcagacagagcagagcagggctaccttatgtctgatccactgtgtcaggagcccctgctgggaatactcaaaagctagactcagctagagctgtcaacagagtatctcctcgtggcctcttcatgtggtggggcttcctcacagcatggtggctaagtgcgcagagggaacattccaagtctctaggtgacagctgcttggccttttctgacctagatgcagatgtcacattgcccttcttttaaccataatctgttgtttgaagcagtcacaagcctgccagattgaagggtccatagacccttacctctcaatagaagagcatcgagaactgtggaaccatgttttacagctgcaacaatggtcacacggaaccccaggagacttgcaatcagaagcaccaaaggccagggtgtggcacagccaccctgcagaaggcaggagagttactccttggagacactgacccaggaggctctgaacttggagattccagtcggagttgaggacacagaacctagatggagagcaggtgaattaagtgaaaacctgctttctgaatagtcagatccctcccactcagccctccactcagttttgggaatgttgccaccaggattatgcccgttacccagaatgtcaaaggattcttctttggtgaaactgagaaaccaaagaaaaatgacctattaattggcataagaccaccaggtacccatctgataaacctacagtgaagtgatcctatgacaacctctggtcatccacactgagcttccagccagccgactggggccttaattagtgaaagagatggccctagacacctgagcagctggggaaagcctctgttgggaagacacaagcacgcaaacaaacaaaacagcaacaaacagaaaaaaggaactcagggaaagaagtacaatgcattagaaaaacaaagacaactcaaagaaaatgcaaaaaaacaaagaaatagccaatggtgagatgttaaaaagataacttttaaggtatgtgaaagagctcttagaaaagaaaaatatgtggcctaagtaaaaaactcaataggagtttgagaaacggtgttgaggaactcttccagaaagtggaacagaaaaacaaagggatatacaagaagaaaattcaaagactattcaaggagatacatctgataaaagaggagttccagaaatagaaaagagagagagaggaaatcatcacagacatttaccaaaatggaaggagggggattttttaggctggaagaaacatgaagtgcttagcgcaatggtggacaaatccccccagccccacatcaatgcatatcatcatgaaactcaggataccagggataatgagacgatattaaaggcatgttggggtggggagtgggaagaggcagggagggagagagagagacagggagagagaataggttatatgcaaaggatttaagatgaacttgacctcaaactcctgctcagcagctacgggaatcaaacaccagtggaaagatgccttccacatcctgaggcgaaatgatttgcatactagaatctcatactcagacaaactttcagtaaggtgcaaagctcaatgggtaaatttgctgctagaaaacttgactgattgcctatgaaagtggccacattttccttggtttagattaatacagaatctttcagaagattctgaaagatctgcagcctcatctggcatgatgtttatcccaagtttacaggtaccttcctgacatccttttcccttcaagtggcttccatgtctgttttcctttatggtcaaacttcttgaaaacatagtatacatcagtgcttctaacttttttggacctctttttttttttggacggagtctagcactgtcgcccaggctggagtgcaatggtgggatcttggctcactgcaacttctgcctcctaggttcaagtgattcttctgcctcagcctcccgagtagctaggactactggcgtgtgctactacgcccagctaatttttgtaattttagtagagatagggtttcaccaggctggtgtcgaactcctgaccttgtgttccgcccgcctcagcctcccaaagtgctgggattacaggcatgagccactgtgcctggtggattgctcttaagaattgataaaagcgacagaacatcttttagaaaagaaaaatgcatgtatacgtacatatgtgagattttccagttaacctggaaggtccacaggtacacaggccacctgctctttctcttctcacacccaatttttacatgcactgtcttattcaattttactaactaccttcttcttattttttcttttgtattacaaaagtaatataatgcagaaaaataaaatcaaagagaaagtcccaatttatccctatcttactggattattctccctcaggtgttctgatttatcctccaggtattttaaaattatgtgtgtgtatctctctgtgtgtgggggggattcatgtatacatataaaataactgcatataagcaatcgtatagtgatatagtgtgttttaaataaaacccatatttttaataatcctgtatagatatcctgctataggttgagtatcccttatatgaaatgcttgggaccagaagtatttcagattttgaattcttttggatgttggaatattgacattatactcagtggttgagcattcctaatctgaaaatccaaaatccagaatgctccaatgagcatttcctttgagcagtatgtcagcactcaaaaagttttggattttggagcactttggatttttagatttaggatgctcaatcagtatttggcttctcatgtgataaattatggacttcctccatgttaacacatagagatttttttttccactgattttttcagttccattatattccttagaatgggtcctcttttattaacttcatgcctttttggtggctatttacgttgtttgaactttttttttgcttatacaaacagtgctgcaatgaaatatatataaatatatagagaaatcagtagaaatatatacatatatatttacatcactagcaatatgtttgtagaatagattcttagaagcagaattgctaagtatgtattttaaatgttctatggttgttgccaagctattctccaacaacattgtatgaatgtatacttccaccaacagagtactggaatgcctctttcctcatgccttctccaatactggatgttagcaatattttgaaagtattgaggatgggtcaaaaatagtacagtagttcaaagttgctttaaatttaatcctcatggctgggcgcggtggctcatgcctgtaatcccagcattttgggaggccgaggcgggcagatcataaggtcaggagatcaagaccatcctggctaacatggtgaaaccccgtctctaccaaaagtacaaaaaaaaaaattagccgggcatggtggtgggcacctgtagtcccagctacttgggaggctgaggcaggagaatggcgtgaacctgggaggtggagcttgcagtgagctgagatcgtgccactgcactccagcctgggcaacacagtgagactccgtctcaaaaaaaaaaaaaaattaatcctcatacatttaacccaacttaattcaacccaaattaatgctaactcttacaatagacagactccatgatcgaatgagctaacacgatcaggttgtattttcctccttactctgtgttctccttcctaaagccttgcctttggactccgggtggctgcagcagggaagggaggggcacaggagacaatgtgctccggctgcctcagctctgcaggggttctcgtcacctgatgtcctgtctccttgcccagaatggtgggcctgtcccctgccagggaggttgggaaactcttgctgtcaccaaagtttgtctttgttttctagttttgcaaagtttggcaatgtttgacaaagttttgctttgccaatgtttttactggtttgtctctgtttttttttttttttttttttttttttttactaatttgtaaaggcttttgacgtattatggaccataacccttagttttgtcatggagggcttaaatgtttcctcccactttgttgtttgttttaaaactctgtgttctctttgaccctacacacatgttttggctttatgtgtttccaggtagcaatattctgagagcttctggattttcacgttctgcttaggggggttgtcctgtgccaaggttatgacatctccttccacatgtttctattaagttgatagtttttaaagcgtattgatatatttaacccaactgtcatctgttttcgtgtacattgtgagagtgtggggttttcagggcagctcttttcaccctgctgaatcccctgtcactgggtcactgctggcctctgaggaaccggatcccagggtcgtgtttcctgctccccttgccttgccctgcatggctgctggctgtgatgcccactcctttcttgcagctccttcctgggcttcaacagaggccctcgaccctgatttccatccttctgctgcaactgctctttccaagatcctccttggccccctcctgccacattacccttcttccagcctagctggggagcgctccccgagagccctggagctggcttcatgcctctatctcctgccagccactgtggtctgtatgccactggctagccccctgcgggtgcccgcaaaccttccctttctggacacctgcctctttctcgtcccctcaccgacagaccctaggcacttctggcttcccctcccatcacaacaggtcccccccactctggccgtatggctgacccagccgatccctcctcccagcctagatcttgtttgcagtgaccttccagcttcctcctactcaaggactcctgctccagaccacagagctgcccacgcttcccgcagcccgacacctcatagctccatggctttgcaggggccatgtcttctgtgtagaactcttcctccagctccctgtctggcaaattcctgtttccttgacagcccagtttaatctacaccctctgcaatatcccctgacctgccaagtgactgggccttcctccctgctgcctcacaatccggcagagcctgcacatgctgagattggcctgggactctggtgtgccagctcactgtcaattgtcaatgaggccttgagctcctggaggccagagccccagtcctcctgcccttggctgccagtgcctggtgcctcacagtggtggggccttgatgagaataaacctgtgaaacagatggtcttggaaggcgaggagggcaggggctgtccctgtataggtcaggtgggccttggcagcataagtaagtagccagccaccccaggcattgctgtgggagctcaggcctgcactgccctgtctgtccattcagctgcagcatcacaacaaggagggtccacggctggaagcctgcccagcttgctcgaaacttctttttaaaagcacgcattttgttcttcaaattccaaagcctcacccaaccctgcaaaaacgacgactcctagaactaccatgctgtgcacaaggcccccgacacccctcagagggagtgatgactgcaaagacatcttgggactgtgatctcctgcggggtcaggcggactctgcctgtgcgggcacacacaccgctggatgcttttccctaagcccccggagtgaaagcgatgctgcacctccactgccttccgcaagcggtttcactttccaggccctgagtgtggagtcatccagagggctggctgctgggtcgaagcacattctctgacctggctggagctcaggtccggtcacaggctgggtcaccttggccttttgtcctctcagcatggagtgactgaggaggaccagctgtttttcagcctcagaggctggctagcagtggggtgcaagccctgtccctgatatggagactttagctgtcccttctctgtcagtccatgtacgtgacatgcagtcctctccccaccggacttcctataaacctgggttggcaaagcatcaacatgtaagtcgccaccacttccttcctcttgggcagccaccacgaactcacctgacaggctgtgtctgaacacagcctcagaatccttctcaacactggaggagaaccaccgtgtgaaatgagcactgcagaccgtgtgcactgctggggcagtgatgagacacctctgaaggtgcctgttgtagctcgaggggaaaccctgaccatgtccacagtgatcatcacggatggttggcaatggggtcaggggcaccgtggggcttctagtttaactctcttctttggaggatgacatggtttggatccgtctcaccacccaaatcccatgtcgcactgtaatccccagtattgaaggtgggacctggtaggaggcgattggatcacgcgagtgcttcttgtggtagtgcttcttggtgctgctcttgtgacagtgagcgctcacgagatctggttgtttaaaaccgtgtaagccctgcccccaccctttcttcctcctgctcgctcgccccttgccttccgcgatgaccgaaagcttcctgaggcctccccatgcttcctgtgcagcccgtggaaccatgaaccaattcaacctcctctctttatcaattacctagtcttgggtgtttctttatagccgtgtgagaatgaactaatacagaggacgagaacacagaagcacagagaaggtgagtgatgccccatctgtgtccagcatagcattccaaggcacgccttgtgggccactgggccctgtggagtggtggggagcacatgcgctgcttgaggacaccgcattctgaggctccctcttagggattgtgtatgtggttgatgttacaggttctaacaagcatggctgtgaggagctggttttgctcacagcacatagcgcactatgcatgtgatcatgtgcattccccatgtggtcctccagtctccggggagaagcccacactggtgatgctgtgcctgcttccacctgaaaacactgaggctggctcaggtgtccacagttggcgatgcaagcaggagcagggccagctgttctctttatttccatcagaaccagagtggtagagtatcagtcactgactccattgcccgtggggctgacaaagcatttctgctgtcagaatctcacattcttgggaccaagctgagcgagatcaggtttccaggcatccacatgcagttcctataatgaagacagaggatctctttgagtggaaagcagttttccatcaccagcatcccagaaacagtacctgggatctattaaagcctcagtaggtattcattgaaattttaaaaactcagttaaatgccggtctttgctaataatgcctctttgcccaagcacattagcccgagcatgagtcctgcatgtattgaggtgtgtgtgaaagtacatttgcacaccaatatgttactactgtcaaaaccaggtagcattgttttgacaaggttgcatgcaccaggatgcagcacagagagcccatgcccatgctgtgtcaccgctgtgacagcttagtgctgctggagatgtggaatgagctcatagaggggactgaaagtgaaacagagactcaggtcctggtgatgttgctgcatacacaccacccccatgtagacattgagaacaaccatcgttttattgtatcacctaattgtgtgggtcaggaatttgaacagttgttctcttccctgcggagctgatggaggttacttgtgataccacatctggcatgtgggttgtttggggaagtccaagacagattcatccccatgctggggcctttatgggggtagccaagaggctgaacttggcaggggccattgaccagagcactcacacgtgtctccatcttgactgtcttggggtctgtggactttctcccagagggagaaggttgcaagagaggaggtggaagctgccaggtttctgagtgagcctccgatgtgtgtctctcctggtatgtcccctggaaaagtgaatggagctagcccagattcatgggactgggaactgactccacttccctgtgggagcaggagcagaggctttgcagctacccttcatctgtacagactgacgggccctgtgatgaatgcagtgtgccgtggagaagggagaaccagccctccccgctgaggaggctctgctgagcctgcgtgcttgcttctctgccagtcctctcctcattgctccgtggcctctctgccaactccatgccccttaaggctggcccttagcaacagcatctgcctctcccttgcttctcacccctgcccctcatgccatgcctgctgcactgcccttgtggacacatcccttcatgagtccctcttctgttaaccctgtgcctgtgccatctgttttcaacatgggcctgaccctgatggcacattcaaaaaaaaatcatatctttacaataaaaatgacaaaaattatatgatcaattagtaataaaatgacacatgctaaaaagtaacttggaagattttccttcttcagaatgtctaaggggttatcaaggcccttttggaattgacaattatgcagaagtgtttgctccatcttatagacaccaggcacaagattactcctgatctccagcgggagaccacacatctgccctgctgcccaggtagcgtgaggcactctgctcggcttgtctcctcggtgcattgggcacaccttgggaggtgtggcagagtgtggccgatgggtgtgttgggcactttccatccaccttgggaggcatgccatggggtgtggctggcaggcagtagcttctgcaccagacactccacatgtgagacgtgctacccacctcacttaagatgcctgctatctgcagaaagagattccactgggcagcccccagaagagtagactccagcatactgttgatggttaataaatgccagctcccctctgtggtcctgttgcttcaggaggatgggtgagagggtccaggctcacggggcttgccctcatattttcttgaagaaaaacagacaattctgagtcctatgttgggtgtgggtggtgagggtggtaaggctgagtgcacgccgtgtttcgggagggttcgaggtgcccaggttccatcatgcctgtattcagagggcggcactgatgattctgatttgattctcatcgcagcctgccagcagggtcatgtggctttgagcacctgaagtgtacagtgaggaaatggagacaggggtgttacctcttgtgcccagagcccttggctggcccaggggagatgagtctggtctggatctccagtgagtcccgggccaggttgtgcccactgagctcctcactgagaccctgatggacgcggagatgtgggatgggggaggcaggctggggagtgtcctggaatgtggggaaacccaggggttggaagatgaaccaagaaggaaggaatgagcattctttcttgcagctcctcctgctcctcatgtctgcagatgcccctccaggtttctgcttctgctctgacctttacaccaggacattcacatgaacccatccctgcccccctcccctcactgcagccggccatgcaaggtgaagggctgacttggacctccttagtctgcaatcctgaagtgaggtgcagggggcaggggaggcaagccctggggccagtgggtctaattcagaggcatcatggtgaaggaaggggaagctaagaagcaggagaagtggctttgtagtgagaacagatgcagaacaactcccttctaggggaagctcaggcttccttcttggaagtgaataaattgcttgtattgactgtttctacctgagggcaccttctctgacagtgccctgacccaaggctgcatggcccaggagccagtggacctggctggtcttgctgcctccatctgtgtcatccctgtaagtgtctcttctcttcaggccatgacattgaaaggctttggttcctcttcttagcagtttctacttctccaaatatctgacaaataaagggccattgctcaccctggaggccgctcaccctggaggccgctgtccccttgacatcacatccccaggcagctccatgtagaactccactgtgaaaatgcagcagagaggctttggcctcatgctatgtcattcccctaacactggaaaagacatctgaggccacatgaggctggtgagcaacgggtctgtctgccccgaccgggcaactctggcttgccacccacataggactggccacttcctgagaacaggagctcctcacggccatattcagggctgctgtctctccctgtgctaaaagactgggtctccgttatgcccctaggcctccttgaggtccttctggccaaatgcagagtcctgttggcattggtgccatcagttaaccatctctgcctctttcaaatcctctgcgctcctcagcagggtgggggtggggattgtggggtgcggtctctttccttcctttgtcctttaggccctccatgctcttgaggtgctgggcacagggaggagaaaactgggtgacctccagagggagaagggagcccgtgagtgccatgtcgggatgggagaagccaagcctcaaggacaagaagctgaaggtgcaattactagaatgctttgtatacttgatcctcttgtaccaagacacatgtggcccccagactcattcatgtatttgatagacaactctgtcatatgtccaccaggggtttagaaaaaccctgttgcttattcttgaatggaatcatccaaaaatgatgggatatcacttaggaagcatcatgtctcagcaaagccttgtgctctctagaaggacaattttgggtgcattagagctctttctgcattgttttcttaaagctttctgtagtgtttagtgatgatatttgggaatcaaagtacatagttaatttgaatttgcaataagaaaaacttctaagaggtaatacttttctcctttagcaagagaggccatgctctgcccatgcaccgggggaggggcagaaagaaggaagctgaggagcctgcaggagactggctgatttctcaccagctgagccctctggacagctttgtccagggcttcatggctgtggagaacagatcctgcatgccttttgtcttctgtgagcatctgccactctggtatggccaccaaatgctcttctccctggtgcatgccagggagctttgcgcacagcattccacagatagcatggactagggaacacaccccaggtggacatgtgacaggcagaagacttgtgcagcgtgctgttcagggcgagtgtgcaaagacaggccacctcttggggagacggcccatagcgcggaaagaagtcatcttcctttccggccattctctttttctctacacacgagccctgcaataggactcagtggctgccgccttcagtctgggctgggccactcctgctctcgagggtggaacactgagatctaagggcctctccctgtcatgatccctgtttatccttcgttgtgctcaacacgatgtttgtcattactaaagcgctcttaaaattgcatctgcacgtctgaatagcctgctaatgcagagctgccctttgcattcaacacaggaacctgcttctgcctggctctaggacaacacttcttgctgggctcctgccaagtgcggctgggctgggcctggagcgaccaatccactgatccaccaatccggagggcagcccaggaggagcgggatcttagtggatggacgccctgcctgtctgtggaatggcttcttcctggggcaaccccgagaacaagagggaaaacagcctctccccctcgcctcctgccctcctgcaggcagccacctcctcagctaattgaaaacaaaaagggacgcagttgtgaaattcagcccccagcgccatcatcatctcctgcgggctcagggggctcctcactgtgtttatttacaaatcagcacatgttgttttggccacggcagcagacagtgaccccagagagggaggtccagagcactacacaaattgcacaacacaagcaggtcatctgtcccctttgctgaagattcctaagaaaacagaggcagctgactctcaggccatctggaagccaccctcaggggccgagcgctcgggggcgtgtacgccagccttgggggtgctatccggacaccaacaatgtcactgctgctgccagcctcagtttctccatctgtgaagggcgcatggttgtggtggtggggcggggggtggtggtcagcatgcagtgattagcagccacctggggtactctaccgggcaggcgtctgtgctgtgtcctatagtttcagccgcacgttctctcattttacagatggtagagcagctgggtggctgccgattctcgccctgcccatggctgccctggcctgtggccgaggctgtgatgaagggcagcctgttctgtgcgacgcagttaagcaaggtgtccggtgggctgcattgtgaccgggtcagccaggccctcctctttgtcttgcttctgctggcagagctcacagcgcagtttctgcatggaggctgccggagttgcttcctgctccgtgctcccacaccgttcttcagctgaccaagtagtgacagcaggactccagggttctgtccctgtgcggcaaagcacacactttcagtgctgcggttgatgcttgagacgctcagtgggaggtcattgcttggactaggactacaagtccaagcacaaacgtccccctgaggtgtcacctggggtgttaggagtgggggatgggaagaggaacaatactgggatggggttcttgaggagactttcgaaaggatctaagaggaactgacctctccacctcccccagactgtgcacaaagaaaatgggcccaagaatccccagaactgggctccgaaatcctcactgtctccttgctggtcaccagcaattgctgtgactcactctcctggtgcttctgtgggccatctgggcaccttggggaagtcccagggatccccaacagcactcctttctccctgtatgttctatcccactgccttcccaggcgggcctggagggaagagcagtggccaggtgtcttcagggtcctgcagggctgatgggagtggtttctgtgggtactgtggctctcctgtgtgggtttcctgccctgggctctgtgtgtgggccttgatgggcactgggctgttcttctaccttgtggcacctggccctgtagagatgacaatttctgaaacaggagcatttcctctgaattccaaggaactttgctcaagggccaactttgccttatgcaggctggagcctgaatgctcgctctgctaccagctgtgtgaccttgtgaaaagtccttaacttctctgggccttactttctcatcgggataatattacaaaaggctgcttgagaaatgggatgctttcagagataacatagaatgaaagcaccgggcacagtaaaattcaactgctattagttcctttctcccttattcaagaaggaaggcagatgaaagcagatttcaggaatggcagcttggagaagaggagagggagtgggggtctagaagaggagaggcagtaggggctatgataatcctctgacattggctgagagccagcagtaagaaagagaaacaagctgtccttcatgtacccactggcttcttccttgcaccctcgggtgccgagctgagctgcagacacccagacctgacagcccttcctccagagctggcggtccaggtggggagtgacatttggctgatttctgattttgaaacacagaaaccaggagagttgagttaaaccaggtttaccaatgtgagtggcttattggctataggtgccccagccaggtatggaagtccagagctggagggtgtgtgagctccctgaatgcagggccagccctggcaggcgagcacacagctaatggtaatggatggcataggaatacggagccaaggtttctggcaagaaaacaatgaaaaatgcactatctctgaatttttctctgggactcagttgaattttagtggtcatgaccagaaatgaaattcaaccagttgactgatatttttagaaatgcctcaggctttatcatctcaactctggggagtgagtatcccagaaatcttgggagtgtgggtcacagcacctgaatgttagtcctttacacctgtaacatcagaattatggattcctgggttccccttgcagagattctagttgggttggagcctgggaatctgtataaaaatacctccccagatttggaaccactaccatagacaattaagcaaagaatgaggtaaggcattcttttctccaaaatgtaattttctggggccctgctagagatgtgtcacctttctaggcctcttctctggtgggagctcagatcctcctgagaagggcacgaatgagagagactctgacctttccctctgtcctttgctctaaaaacacagccccgtttaaccggacagaggatgactttcttctctggagtgctctgggtcacgcttggggacacatgaaggatacgccctccctttcaggctcccatcgcacgttgaacctggcttgtgaacacagccctctgggacactactaggaacaaagtgttccggatgctgcagaagctcagctgccacctggaaaacctgtttggccactttaggtccagatgacgggagccagtccggctcaggagaacagagctggcccagtaacacctcgcttcctccctgctgcagagacctgggagggccctgcccagcacagcacactggagtggccctgcggcagcatctgggctgctgtacccatggtgcctcccagcccgaggggctcccggcagctctggagactcctgctgtcacgtcacctggcccctcaccatcaccatcctcatctctcttgggtgggtatgtccgcaccattcctagcctcatttatttatttatttatttttgagacagggtcttgctctgtcacccaggctggagtgcagtggcaccatctcggcttactgcaacctccgcctccaggggctcaagtgatccttccaccttagcctcctgagtagctgggaccacaggtgcacaccaccatgagcagctaattgcatttttggtagagatggggtttctccatgttgcccatggctggtctcgaacacctgagctcaagtgatctgcctcccttagcctcccaaagtgctgggattacaggcgtgcaccactgcacctggcctcatttaaagactgagaaaaccagatcccaagaaatttgctcactattgaggatagctgtcagcagacaccagatttgggcatcgagttagcaagctctggccgtgtgcttgagtactagcccaaaaaacatccccagagtcatttgtagaatgagttcttcttacttacccttattaaaagacttaaatgtgcatcaatagttcccacaaaagcctagtgttactgttttaaatactgagttcgtgagccagtcaaagattggggctttcgctggttcattagcttgtttcatgtttggaaggagacccacgtttatgtccagaatgtgatattctgtctatgtgctgatcttagtttggaagtggtttgaataaagccagaaatgccagcatatttagttatgaatcctggtttgcaaaggtgctgactttggttgtccacaagatcattggccccatagctttacctaaccgtcttacacaactgtggtcttctctgtgggacttagaggaacatctgaagagaggagcaagagtgggttggttgattaccgacagggcaggggcacagtatcccatttgcatactcatattctggaagtcaaggggcctctagaacaaagatgttcagtactaagcaaagtgggcgagaaatgaggaaaaaaggtgcaatgtgcagggagcagggctggggccactggcgggagaggaggcctcctgcttcagaacccggtcatccaagtgcaactctttagaatccaaaacacgtggatgcagggttgatgggtaatttacaggtttcggccaacatgtgagggactctccagtgcttttgagctggcctggggcccacgctgctggctgtgggaggctggcgtgtcagaggcagagctaaccagttgcctgcttggatccccaggcactcagaacagggctgacctttttttgtgcatggcctgggttttgtgcttctgcacaggtttggccacacagtccaggggctgacaaaggggacccggaggggccaccaaagactctatgcctgtgctgaggatggagtttaggaatcatggctgggcatgggcggtggcaaagggctggcccccacttaccctcactgcagggctgggttctgttgcctgcgtcagcgctcaccgtgggagtgggtctcaaaggggcatgctggaaatttgtgggggcattttttggtggaaacagttaccatagggactactggctttgtggtccagggctgaggacgctcaaggttctgcgaagcagagaaagccccacacagacagacggcactgtggctagtgtcactcccttggcttctcatttgggtggcagatctgtgtctggggatctggtctggtcccatgcctgtgttctgtcaataccacccacttctctcatggctgtgatagacactggatttcccaacactgcagctatggcatagactaagggaggatccagactttgctttgctccaagctttgccaagctttgttcctaatttcagaaaacagccctagcgaatgctggaattaccaaagcaaggtccactgtctggcggaatcctcagaaattttaccttaattttacctgaatgcacgcatctgaggacttgatttgtcatctagggtagttgtgcctaaacatttactatcagaatagatgttattgtgtattatatctatgtcagttttctttgtattaccattaaagcattacatatatgatctatctatttatctatcatctatctgttataccatctatcatctatctaatctatctatatcatctttatttctctatcatctatctatccatctgtaacatcatctatctatcacttatagacacattatattaaccagaagtttcatttcaggacagtacagcgaatgttaaaattattcatgatcaaaggggctgtttgattctagcattcatatacaagttgctgatggaatggccctagagcccagcctccctccacagagcccctgcctttggaaagatggtctgactgaggctcgccatgcccttgctgctttgctctgcaggggctgggccggatcccccagagcagcgagccctggctgtgtctctccccctgtcaaacttgcctggcggtttgttgctgagtctgtcgtggctgaggcacctgctcccttcagagcatcacacccagccagttcccggaggtggctgagtgtttgctttcaggacattcagtagtactgggaaatgtgtgttgacacaggagataagaaggtcagatgggaagagaggaaggagggctgccactgcccagcaggcagccaggaggcctgtggatcccaagattgggatcgattcctcgggttcatctcaatattgtgggaggaaaacataaaggagcccagagccacttgttgagggccctggaaactgtccatatgaaataggcaccaacactcatctgtgaactctttgaatatgacaagggtaaattcccaatttcccttttccaggtatagaacgcttaaatgcattttcctgaagcccttctgcctccatctactaggatgccctcccaccttctcacagaggctgcatggctgtcacctttccatgtggcagctgagttgggtgtggggatccccgtttgagaggcaaagcttttgatgtgcaccagggagcggactgatctgaagtagtcgtttgactttggcaactgcttcagtttcctcatggcaggtgtgcagtgggtcatgtttctttgttgattctgaatttagctttgagaagaattctagaagaggtgatccaaagctatctggaataaaatcctggaaagaagtggacagctctccccagacaacatgattttggttgtgcaagttctggtggttttgtggggagacaccaggcttagggtcacaccatgtgcacattctgtattattctgagttggaaaccatgagtgcatgctgcagctggttgctatggagtcccgtggactgttgtactgagaaaaactcggatagggagggtgcatgtgtgcacgtgtgcctaaatgcagtgtgtatgtgtgcccacatgtgtatgtgtgttgtgagcatgtgtgtacaactgtgtgtttgtgttgcatgggtgcgcatgcctgtgcatgtgcctggggagggtcatcagaggggtaggaagaggacagacaggcccctggaagccctttgcagcaggcagtgagcaggcaggattcacaggacctagcctgcctctgagaggcatttggaggcctccctctgggtcttctaggagcttcggtaagctgtggacacatctattccagtttgagagagatgggagcagatgagacttgatgtgttcctgtgtgtgtttgcaactccttgcatcatccagtgacaagcagacccctgcaatggtggctgagcagtggggcctcagggagaccccacccttccttgaggatggtgttgtgcccactttctgtgcccatggaccttcacctgcacccctttggagccaaacggcatttgggcctgggaattttttggattatagtgtggataccacataccctacaccaccccttgaggtgtggggagcaccctgtaagcaaatgggttagtgtttcgtagcgaaaccaaatcaggtaaataaagactcacaggcattcaggtcaagcttggcctccaaatgagttatggaacaatggtcagttctcaaagtttattgggttttgagtgactgcttagcaattgctgacctgcaaaagtcaacaaactcagttgactgaacaaaccaagttgactgaacaaacccagttgacccaaaagtcaggccccttcttggtcacagggcttggctctgcttgcagataggccctgtgccatcaagcaggggctgggtaggggacctaaaggccagcaccagaggtggatgctactggaaagagacctggggtgggagggatctgaggatgagctgcttggcccaggtccagcctctgctgaggtgaatcattccttggatagtctgcagcccccaggaaggttgggtgggggcaacagccaggatggccaagggattgatcagagacaagtggctctgggccgggcgcagtggctcacgcatgtaatcccagcactttgggaggccgaggtgggcggatcacaaggtcaggagtttgagaccagcctggccaacatggtgaaacccccgtctctactaaaaaaatacaaaaattagccaggcatggtggcatgcgcctgtaatcccaggtactcagaaggctgaggcaggagaattgcttgaacctgggaggaggaggttgcagtgagcgaagatcatgccattgcactccagcctgggcgacagagcaagactctgtctcaaaaacaaaaaaaaaaggtggctctggtgtgggcaccaagtacgtaagagttcatctggttggcccagtaagtgctctgggataagaaaggggtggctcctttgtcccttgtcacgctgccctttgccccagtggacccagcagaggctggacctgggccaagcagcccatgctcagggtcaggggcaaagggggaagacaagaaggggagcttccctgcatagcgccctggcaggtaaggaggccacagatgtgagggttctgtgagtcctgtcactaggaacactggcgccagctgtcctgcatcctgagtgtgtggggctgtggggatccatcgtcccacctacagtcctgaggggagcctccaggtttagggctgttcaaggccctcctaaatctcagattgggtttcctatctacccggaagaaagagcgctagatttagctttaaatcaaattaaacaggaataacaaaatgtgatgtgtttggcctaagatttatactccttatgtccaccaccttagcccttctggagagacagaggcacctaggctcagacatgtggagggtagatggtcacaggcaggagcccctggccagagtagcctctagagatgctcctcatcatcccttctgggatttgttttttcctagttggagattaaaaaaaaaacaaacttgaaaaataattctgaaatgaactatacacacaaaagagtatctgtaacttacatatacatagaaaatagcaataataaacgaagacacacccagattagcagtttgaacgttacccagacctctaaatggtcccataacattcttcttctttttcccactttcattgcaataaccactggcccggattatgtgttaatcattaccttgtcttgtttaaagttttactgtaaatgtgtgagttgtcaagcaatagatagctaaattttatctgtttttgaacatttgtaaataaagttatacagtataaatttggtgacttgctttttttctgctcatgagatgcatgcatgatgaggcatatacctgttggtcaatcatttcacagtgctcccttgcaggaattattcgcctggtttcgggcttttgctactgcaaacaatgcccatctgactattcccttaagggcacaggtccctaagcgtgatggctgtgattcaaattctgcctcccagcacctgcctgtgtggccttctggggtccagggtcatcctttttaaaatgaagataataatactacatgcaccagcaggctctaaggaggactaagagagtgaattcaggtaaagcatttaacatggtacctcacacaggatcagtttaaaggttagatataatgatagtaatggtggtagtcatgatagtggtgatggtggtggtggtgatgatggtggagacggtggtgatggtggtggtgatggtggtggtggtggtggcggtgatggagatggtggtgatgatggtgatggtggtgatgatggtggtggtggtgatggagatggtggtgatgatggtgatggtggtgatggtggtggtggtggtgatggagatggtggtgatgatggtgatggtggtggtgatggtggttatggtggtgatggtggtggtgatggagatggtggtggtgatggtggtggtggtggtgatgttgatgacaactccttgggtacttatttggaaacagagtctttgcagacacagtcaagttaaaatgagatcatgagggtgcaccctaatcctaaatgactggttcaggtgtccttataaaaaagacaattttgagacacaggcacacaggaagaatttcattcgaacatgcaggcagagatctataagctaaggaacactaatgatggccagcaaaccaccagacgcttagaaagaggcctgggtctcagcctcagaaaccagccctgccgatgccttgatctcagacttctggcttccggaataaacttcccctgtataagccactcagtctgtgaaagtttgttatggcagccctagcaaatggacacaaaaagcacagaaagagaattcctctcaaatggaaatgttcctaccattgtcaagagattgatttttaaaaatatcattttatgtgggcctgggtgcggtggctcacacctgtaatcccagaacttaaggaggccaaggcgggcagatcacaaggtcaggagatcaagaccatcctggccaacatggtgaaaccccatctctactaaaatacaaaaaaattagccgggtgtggtggtgcgcacctgtagtcccagctacttgggaagctgaggcaggggaattgcctgaactcgcgaggtggagcttgcagtgagccgagatggcaccactgcactccagcctggtgacagagcaagactctgtctcaaaaaaatatatattttatgtgctattacatttttcttaaaagatttatactactttgacactcagtgttataaaagggaaatccagaagaaaacactttaggtagaatttgatgatggccagtgtgggcagagtccatataattctgtctgcggcacgcagtggctcttgaagacgccataatacagatgctgcacaaaggccactacttcctgttgctttactgtaggaattaagacattgaaggaactgctgctgccagcaagagaggctgttgcaagaaagaaaggctgctgcaagaaacgcaagaaaggctgctgccagcattgcatttctgtcaagaagctgccccgcaaaatttatggatgtatcgctgtatgcacctaatagcaagctctactggatgaatggcttataaagatctcccctgaataaaattgtggtttttaactttagaagaacaatgtcaattctctctgcatcctttatgggagcctcagcatgtgttcagcactggtatttattctatatgactgcttgttaagcaacaggctgaattaaaatgggaaagctcaccgaggagttttcttgaaatactgcttttctagcaaggagaacatagaagatggtgaggcagccgcagctggagtgctgactgcccagaagcagaggggcaaaatgcactccagtatggattttggtcattgaggccttgctgagagcatgccccaggctgggttcacttttgcctgaaggggctgcagcagaatgaaaactcaactgtgcaaaacaaaacactcaaattttaaaaagcacaagattctgctgggatcatctggcagcaggggcagcaggaaagacgtaatagagatttcaaagcaggctgaggaggaggacagggcattccagcctctgtggttcagcaatctcaccactccacaaccgacggtggctttccaggtatgcagatttgaagggtgcccttccatggagggtgatcgaggtctgctaatgccattgctctgtgggtgtcatagtgagtgcaagtgccttggccagtgtgcacatcccaagtgtgattaactgaatgttcctgtccccagtatgtacatactcctggttcctccagtgtgaacagccccacagtgtgcacattcccttagtgtgcacatgcctccagtgtaaacatccctccagtgtgcacatccccatagtgagcacattcctcctggtgtatacatccccccagtgtgaacatccccccagtgtacacattcccccagtgtacacatccccccggtgtgcacatccccccagtgtgtacatccccgcagtgtacacatttccccagtgtgtacacatccccccagtgcacacatccccccagtatacacatccccccagtgcacaaatccccccagtgcacacatccccccagtgtacacatccccccagtgtacacatccccccagtgtacacatcccctcagtgcacatccccccagtgcacacatccccccagtgtgcacatccccccagtgtgtacctcccccagtgtgcacattcccccagtgtgcacatccccccagtgtatacatcctcccagtgcacacatccccccagtgtgtacatccccccagtgtacacatccccccagtgtgtacatccccccagtgcacacatccccccagtgtatacatctacccagtgtgcacatcccctctgtgtgcacaccttcctagtgtgcacatccccccagtgcacacatccccccagtgtatacatctacccagtgtgcacatcccctctgtgtgcacaccttcctagtgtgcacatccctccagtgtgcatgacccccagtatgcacaccccaagtgtacagatgcccccaggatacacgttccctcagtgtgcacaccctgcagtgtacacattctcttagtatacacattcttccagtgtgcatgtccttctagtatgcatgcccccaagtgtacacatgcctccagtgtacacattagcccagtgttcatgcccccagtctgcacatctcctagtgcacatcccctagtatgcacatctcctcaatgtacacacgcctagagtgcatgcctagtgtacacacgcctagtgtgcatatcctcctagtgtgccctttcttagcatttacaccccagtgtgtacatccagtacacatggtgcgcacagcccccagtgagcaatccttcccccagtgtgcaatccttcccccagtgtgcacatgctccagtgtcaacagcccctggccagccttgtccaaggcatctctgcaggctcagcctatgtaggcacatgaggacaatgcagcagagtcagaagctgcctgtgctgagatgatgataaggacacgatgcggagcacatggcccccgctctcaagcaccttctagtccctggggtcagagtgcttagaatggggaaggctgctggacagggctgagggggtcttagctgagtgaagatgctccatcagtgagggctcctgtggggactgagaaggcagcgctcccctcactctgggtcagctgatctggtgagttcattgcacagggcttcggggacagggcggtgttgttcatgctgctgatgggaggagtcctgggcttgcagcgcctgccttccccgcccagcaggcagctcggagttctgcccagcaaccaggccccctccatctgccgtctgggataatgagctgaccctgaggctgctggcacaagcccactttgtgtcttctattcactgggattacctttcagcttcccattgttctttgctaatggccttaaaacatgcctgcctgttaccttccctagccctgctggctgctggaggaaagcctcatctcctccaacttgaaaggcctcctccactccatcctggcctgggcgggtggtaggaatgccagcctgggcacagggatgtaagccggccacccagccttcagctgcagccattagccaggcctcaagtgtcacaatattttatgggacgcctctccccgcccttggtgaactggccgggttgccacatggcccagcttctgtgctttccaagccctgcctccactgagagcgtggctgtccccgtgtctggacagatggctgaggtgggctggagactgctggcctctggccctggcaggagctcattcactgtgattatccagtcgtcaccctgcaagggcagaggggacagggcagcagtggctgcattgacttttaaccctttccagagtgaagggctggatccttgggggaaagaattcatccaaattggacgagcccttcacactcggcctcattattatccacgcgtgcagcaaaatgggggagccaaatgtctccagttatttacactgcatctggcaaaaagataattcgcttcttttggaggcatttgaaagctcaaccgtagtgggctttcacctaatgcaaccatcagcattaagatgaagcagcatatgacagcgttattaaaacatggccactcatttcctttttgcttagctttagagatgatgaaaacatacagtgattccttgtttgaaaaggaaatgtcaaagaacagatgctatcagggtctgatttataaaagtgtgggcttttataaagtgtccaggtctcctgggcagcatctttaggggactactggacacagctcagggggctgaccccctggccactgccaagctacaaccttctcaaggccctgagtcacagaagacagtctgcgggtggcagtgtctgtcgcccgtgtgtgcacatgtgtgcctgctcctgtacagggccccggcacgcgtctcagacgggctgccggctttgttgttggaggcgcaggcttctccagattggctggtcttcaaagcaatgacatgccgtgtcagatctgccatagtccaggcacgtggcaggcgtccagcatgcaaatgagtcggacgctttgcactggcctggagcgccctagacagccgccccacacccctgggaggcccagcaggtgcccgcgaggcaggtgtgcagctcgccatatgctctgctgagcgtcgggtttctgccagcatctttcaatgacctaccaggtgagataaagtgagtggaaaggggcccgtgccaacctgtggctgcacaggccacttctgggtagggacagccctgaaacctgggcagggcaggcagaggagggacaaatgtcagggtggataattgctttaaaaatcccctgcattttagaaacagggaaggtttatggctaaattagatatataccttccaaatgcactgtctgtctctgcagagcccagatttggagctggaagcctaagatagggccccaacttttctccccgtcatggccacctggggagccttaaaaatccccatgctcaggctgctatcagagcagttaaatcagacactctggaagtagaacccaggcatctgaattttttgtttctcatgtgattcaaagtttgaaaacccatcatttagagctgtgctgtctaatgcaatagccaccagccagatgtggctatcttaatttaaatgtattagcatttttaaaagttagtctgttacatgtgcaagctacatttcaagtgctcagtggttgtgctgaacagtgcagaccctgttcagagaaccttctcattattgcagaaagttccatggagcagtgtgctgtggagggtcctttcagccccttgtcctccctccctgagaaggtgacctgccttgctccggggcacattggcagtgcagggcagtactgtgctattctattctcatgccctaatgccttaggctgctgggggcacaggtgtgcccagagaaaggctccagaaaatcaagctaccacgtgcttttcagcaaagactcagcatgcaaaaatgaggtgtcccccaaacaccttcatggagccccctcccgggtgccaggccaactttggttgacttcggtaatgtgtatttccatgacatcctcttgtcccctggtcatgcatgccggagtcccaaaaagcatggatgttcctaaacagccccctgagccctgccttcatgaatgtcagcgtggggggctccggcaggcccacgtgggcatgtgccggtgagtgtgaagcctctgtctgcctgtctgggtcccctgtaattcatcagatgcatgtttgtaacaaaaggatcatgccacacgccagggatctttgaaactgaaagtttggttcttaaatgagcccaactgcaaaccaaatggtgtgtggagtgctgaacgggtggggacaaaaatcgtggtggaggaggtggcttttctagcagggcagcatttcacagcacgtgctgccaactgttgcaaaaagaaaaaaaaaatcctaagaagaagaaagagagagggaaatgtacatattcctgcagccctgcaagtgccctttcttcttcattgttctctggagcaggcagcaggcccggccaacagctgtgcattgcgtgtatcactaacagctgctttttcctggggtgaaattaaaagattaggggatatgggcacgtgctggcctcaggagcccaaacaatgcttgatttagggtgaaacttgtctggggagactgacaaaggaggaggctccgagttggccaggggtcaaagaggggagctggctttgacagagacaaaaggagggagggggtgggaggcagagggctaggggagccaggccaagtgaaaagaggcctcgcagcagctgctcctgccccagaaatttgagacgggtcttttcacaaacacaaatgcctgagaagaatagggggccacgcttagctgaaatggctcgtttgcaaatgaaaaggagattgggagcccttacattttccaagttttcacctaagaggatggaaaatgattagtgtaggcaagaagtgtgcagaggagcagatgggccagccaccctggagctgcactctgtgtttacataacaatcatgcccactgccggggtgcagaagcccaggccccctaaatgtccagcaaggacactggcaccccggaattcgatcagtgcagttccagctgggactccacaggacgtctttgctacagcgtgtgtggatattaatttatgtgctggataaattaaatacacttataaccatgaagcggcaaggtgattgcagcaggaggcaggctggcagacagcacgccggtgtggttgttgtcccttggcaggatgcctgacttcccagacttgctgtttcttcttggcccctgctgagaacattggaggagaacccctggcctgcacttcaccgtgtgtgacgaaaagggttttaaccatgagcaaacacagggttggaagccagtcccccaaatcaggcagcacagaaggaggatagcaatagccatcttagtaggaaaagcacctgccacacctcaggagcttcccatgtgcctggtggggtcccacagcagcttcgtgggtttgcaagggtgcccagagggcagcgaggcctcgattctagaaatattcctgacaaaaatgcacgacctgagataatcttgagaaaacatctgacaaacctacatgacctctgctctgagttggatgccagggtcctggaagacagaaattttggagacagagaggcaggccagctgcgagcagcacacacttgggatgctcttctgtggtaaaaggcattgtcgaaacaaccggcaaaatcggaatcagttctgcagattagacaatacaattgcatccatgttcatttccagggttttaggactgtaccgtggttacataatagaatgtctctgatttttttttagaaaataaacagtaaatattcagaagtaaagaagcatcatgcctacaactgactcccatatggttcagaaaaaaattacaactctctctcctctctctctctacatatatctacattaaggggtggcggaggaagagagaaggcaaaaatggtacaacgtcaacatttgggaaatccgggtgaagattatggccattctttgtactgttcttgcaaccttttttctaagtctgaaattatgtcaaaatacaaatgttaaaagggccaaatggggcagtggaggtgtagaccatctgtgtggtcatcctggttcccctcccaggtagagacacatctggaagtcgttagttctggggcattttggcacctcgctcagcaatcccctgggtccagagcagccctggcccaggcctggtattcttatcagctcctagtacatctgtgatggacaatgcctgccacctgggattatgttgtccagtgttgagtgtgtggaggaggagacagggctgctgttttgggcacgaacactctcctgggccagcctgaaggatagagtgtcctcccaaagttgactcagttggagaggtctgagtctctgctctggctgtgggaggctgtcgagtcaccaggtgggaaggtttccccgggggccaagaggacaagtctacagctgacctggttgtagtggcagaagaacaaggggctcagccagcaaacaggagaaaggaggcccactcccagagatgtccccgggcactgtggtggtggccacctctaacatgctggttttttttttttttacgatgagctgctcttttcatacactgagtgataactggatcattgcattaaattgactgcttctcctgctaggtattagctgatagttttttcttttgcccctccctcttgcctacacatctgtatcacctggagaggttattaagagttgcccaggcctcatccatccccaaagagctgtatcagaatccctggggatgggaaaaaggtggaagctgggttttattgtgctgtaaaaagtcatgatagggattttgagtgtgttttcagcattgcgaagggctgcctggtaggttggactcaaggacctagctgtgttctcaagaagagtgtgggctgggcactgtggctcacacctgtaatcccaccatgtgtgagcacctgcagggtgcctggaaccatgcatggctcctcatggctgcacatgcgtgtctgctgagtataagaaaaagatctgaaagaaatcattgctgttcagaacaatcttcactcagcacatggcaacatgctggggatatgctcatgtccatacatgtgtccatgcacatgatctgtgctcaggaaactggggaaagaaactgaaagtaagctaaaaaaaaaaaatagcatgttctcagggcacactatcacacacacccgaactcagctgactcctgtgtggcttgcttgtggcccaaatcacctgttttcctcctacttccaaccttcccgaggttggaaggtgctagtgagaggtgacacagtgctagcagtgctagcagccctcgcagccctcgctcactgttggcgcctcctcggcctccgcgcccactctggccgcacttgaggagcccttcagcctgccactgcactgtgggagcccttctctgggctggccgaggccggagccggctccctccgcttgcggtgaggtgtggagggagaggcacgggccggaaccggggctttgcgcagcactcgtgggcccgctagattccgggtgggcatgggcttggcagccccgcactcagagtggctggccctgtcggctccgggcagtgaggggcttagcaccctggccagcagctgtggagggtgccccgggtcccccagcagtgctggcccacctgtgctgcgctcaatttctcgccaggccttagctgcctcccgcagggcagggctcgggacctgcagccccctatgcctgagtcttccccccggcggccgcccccgccccccggccccccggcaccccccgccccccccgccccccccgggccccagcagccgccgccccccctcgccaccccaccgccgccgccccccgccgcaccgctgcccccgccccgccaccgccaccccccgccaccgcccccctcccccaccacgggctcctgggctgcctgagcctccccaacgagcaccaccccctgctccacagcgcccagtcccatcaaccacccaagggctgaggagtgcgggtgcaccgtaagggactggcaggcagctccacatgcggcccccctgccagacccactgggtgaagccagctgggctcctgagtctggtagggacttggagaatctttatgtctagctaagggattgtaaatacaccaatcagcactctgtatctagctcaagttttgtaaatgcaccaatcagcactctgtgtctagctgagggtttgcaaatacaccaatccacactctgtatctagttaatctggtggggacttggagaacctttatgtctagctcagggattgtaaacgcaccaatcagcaccctgtcaaaaaggaacaatcagctctctgtaaaacagaccaattggctctctgtaaaatggactaatcagcaggatgtgggtggggccagataagagaagaaaagcaggctgctggcgccagaaaagagaataaaagtggcaacccgctccggtcgacttccatactgtggaagctttgttttttcgctttttgcggtagatatttctactactcactctttgggtccacgctgcctttatgagctgtaatactcaccgcagaggtctgcagcttcactcctgaagccagggagaccaggaacccaccgagaggaacaaacaactccagacgcgccgccttaagagctgtaacactcagggcgaaggtctgcagctttactctggagccagcgagaccacgaacccaccagaaggaagaaactccgaacgcatctggacatcagaaggaacaaactccggacacgccgcctttaagaactgtaacactcacggcgagggtccgccgcttctttcttgaagtcagtgagaccaagaacccaccaattccagacacactggtagagagtcgatttagcaaagtgtcattgccacacagagggtcctgtgggcagtgacgttttggggaaggcgctgcagaaaggtcagccgtagcttgcttgctcctgggttttacctcttcttctgcagagattcagagctacaaaagtcagactccttgccacaggtttcaagtgccgtggaagtcctgcgtggggacaggcaaggcctcatgacatcttgggacacagcccttggaggtagagggagaggccacagacacccccagagagagcacagagccctcggcagctggcctcaccaggctctggaggaggtgcctcggcttgcctctttcgaactggtgtcttttccaaggcccaagtgacttgcaaatccactttcatctgccatagcatgttaaaagttctcaaaaaccacagggcaggccgggtgcagtggctcactcctgtaattccagcattttgggaggccgaggtgggcagatcatgaggtcaaggggtcgagaccagcctggccaacatggtgaaaccccgtctctatcaaaaatacaaaaattagtcgggtgtggtggcgcgggcctgtaatctcagctactcgggaggctgaggcaggagaatcccttcaacctgggaggtagaggttgcaatgagcctagactgtgccattgttctctagcctgggtgacagagcaagactctgtctaaaaaaaaaaaaaaaaaccaaaaacatggggcatctgaagttacgacttccagataatttagcaaaagagaaaggtttcagagtaggaatttagctatgattttttttaaattaaattttttaaaatgtgaaagcacatattgtggtgtctcttagccccagagccagagggcaattagactctagtgtcctcattgtaccctaaagcaaaagctaagcgtgctcctggcaggcacaggccgtagcagggcctacaggctgcccctttcttggtagtgcagtgatcctagccagatccagacatatatacttggcccacggtgaggggctggcagggttgtgggagagggtctgtgtggcacatgctgagtggtggattgttctcagagtgaagtgtgtttttcttctccagcactgcctctctgtagagacacgcctggccagcagcagaagctccagcattctttgttatcacctctctggactaagtgagaagtccacccgtcctatccctctttaccttccagttggggttggggccagcgactgctgcatactgtgggtggcagttttgagatgcacccacacgttcttcagcacccctacccctgaggggtgaggtctgcctcctcccctgggacccaggctcatcttcaggactggcggatccacagtgtccagcagacagtgtgtctgctgggatggtgtctgactcctgaggatgagccctcaaaggcactgcagcttctacactgagcgctgctgggaggttcttgctggagccctgagtgttaataacacccaacaagtcctgccacctgtggccgccataatgccaggaagcacaaaatatcccatggggagagagcacatgggaagggttgaggctgtatgatgagatgcctggccagcccctgacagctcctgtcactgtctgactacaccgcagaaagccctaagccagagccacccagctgagccttcctgacaccaggagtgagcataaaataactgtggttgttttaagacactcagtttgggacgatttgttacacagcagtagacaatgaggatacctgatgctccctgctattacccttctcgctccagactgggaaaccccatgcttcctggacagcccatggattcttagagagagggcccaagggttcttctcctgccatttccagctctcggccctcaacaaggctgcttcagatgacgaggcacaaatcccaagccttatgcttgcttacttacaagtgcctctgctaatttacttttaattcctccctttctttcaaagggcttgcaggtgccttggcatgctcccacaaggagttaaaatgaaatcaaggacattggcagactttagtagaaaagtggggaagagaaatgaatatatcaggaatctaagataaagtggatgctggcatggagttaatacttaactctcatttcttgacagctaagggttttttttttttgaagtgccagttctttaaaaaaaaaaaaaggtagagtagttcctccagagaggcaagttattttcctggcatttttgcccagaaaaataaagtatttaaatatacagcataggaaataacataacatttaatgtttccaacaaaatgtgttttcagaggaataaaactctcacgtggtaatttttcgtgtcgttgcataataaagtccttgggcaaaatgttttgtcctcctctgggcacagcctatcttttggcagctggacagagctcagaagacccgggagacagaatctgccttggcgggcaggtcccttgtggacatcggcagcccttgctgtgcttttagcaggaacagggtgatgtctcaccaatgccaggggcagatattctgggccgttgaatgaggccggatccacatgctcttgagctttccagacaaagcaaatgctgacattctgttccacaagtcctgtcgggaactctggctccagtggagagccaggggaccgtgagggccagtcagcgcctgcttctcccttagaaggtttgttgggctggaatatctggacggcactccatggacttctctggagcatgagacaatctgaataggcacaggtggtgccttggatctgtgctgtgtgactcaagctgcaggctggaggttctccctggagacagctcgggctgctgtcctgctataggaactggccaggcctccctctgcaggcaccaagtaatggctttgcgttcttgttggtcacggctaacatgtattcatgccacacaaaacacaggcacgtgcggtgcgtgggtttttatgccttatcgcctgtaccaaaaataaatcttccttgtcaggcctgactccagagcatgggagtgggcacagcgtcagtcgtctggcactgcctcccttgtcatcctggggttgccatcatggaatggaactgctctctgtctgctttgtcttactcctccactccagcgtgtacccacagagaggaatggcacaggggacacacatttccctggatgtgggacatctgcaagggctctctgtgtgtccctccagcaggagggctgtgtcctgttctttgggggagctggggatctggtgggtataaatgctccacctccggcttccagcatcctaacagaggctgcgcccatttgggcagaagattggacccggggcagggtccgtgagcactgggaggctcgccagtggcttggccctgcgtaaacctggacaacttggacaaactctggggcagggtggggagaggcccaggaactaccctggtggaaattcccacccatgtggtgtgggggatccggctcttgatatgtagggaaatgacgaatgtgcaattttctgctcacctgagatccacgctggccataagagcattattattttctgacaggacaataaaaatgcgtgctttctcttaccatctagctctgtgcactccagttaaatcacacctagctggctgctgactcagcctcttgcagaacgtccagacagatgttccaacattacctggtcactcctgcctggagctgcagcctccctgctggttcccatccccagggagccggcctgctcttcctgccctgccacctgtgttgctccaggctcagccctcatcctcggggagcatcaaggtcagagtcagcaatgctctcacgtggttctgaacaacatgcccaggcagctcccaagagcagctctgccagattctaccattcccattctcctgttggtgactatatgccttctctttttataaaactatttccttctcctttgtaggcagctcactcagtttccttatggctgagttgcccccttggtaagtgagatatcagatgtaggatgcctagaagcccctctacaaaggacactgatgactatgatactgatgatgtacagctttctagaagcattggtggaccctgctatgcactctagactcccttccaggaagaccttgctgcccagctgcagggatgtggtcagcagacagcccccagctggccttcctccaggctcagggtcacctcagcttcctcagccactgcacccatcccaggtggccacctccagcactggggtgcagtccaggaggcagtcgcacagggccggcagctgcctaacgggcaaatcttcagtggtatccctgacctacagccccctcggggccagcccaggctggcagggagcctgtatcttgctgtcctgtaccctgccctgtgctatggatcccagggtgctccttcatccaaccctgcatgccagctctgtgagagttggctaggatgggcacagatgtcaaagctggggggccggagagtttacttccagctccctctttcaataggtgaggcgcagcatggctgacctgcagctcagccccagcctctctctgcatattcattgggacagcagacaggaggccagagagccagtgcttccgacagaagccagggaggcctgtggaaaactgtatttccttgtggtttatacaatgagaacactggtgtagagttccaggcccctccactctgtagggcattttatttcttggcttcagtgtcagaggacagaatgacattagccccattcaatatttctttcatgctctcaagggaggctgcagggctccacctgcccatcctgtatgtctgtaatttttgctcctggtttattacttacccacatgcgcaatgtaaacacgtgcctactgagtggccaggccggtcacagcatccacctcctgaaacctgtcaggaggggcaggaggggctcagagccacttgtgtcctgggagcacaggactgggaatcagatgggcttaaagtctccccactgacttttatcagagccacatgacctagagggctgtcttagtccatttcccattgcttgtaacagaatacctgaaactgggtaatgtataaagaaagggaatttcttacagttctggaggctgggaagtccagggtcaagggcgtgcctctggggaggacctccttgctggtggggactgacgaacatgctcagcaaggcatcacgtggtaagggggctgagcgtgctttcctttgctcataaagccactgagataaccctttaatctgttaatcaatgaagagattaatctgttcctaaaggcagaaccctcatgatccaatcacttctgataggccccacctgagtctcaatattgccacattggggatttagtttcaacacgagctttggagggaacattcaaaccatacaaggatatacacattcccggtcctcacacataaactgggcgggagagcctcaggagctgtagtactgccccctcaagtttccctaaaagcagctgcctttcttagagctcaaggctgagggcacagcaccgcccaactaaagctcggctgccctatattctgacggatccttattgataaggcctggaaaagagatatccaggggaaaagaacccaataggaaagaaattgtgattcagggcctggaacaattttgagactgtcatcaagccaaatgcagaaggaaaaaacccacaaaaacaaggtaactaaaaacagggtaaaatgataagcaccctaagagagttgtagtgcaaatatgaaaccaataaaaagatgttatgaaatgaagccatgaggagctataagacaggaggaattagttcatcttcatgccgggaatattgttcctggcctgcaggatgggagaatggctctgcagagaaggaagctcattcctagggtggctctacttgggtcagaattgaacaatagtttatagttataataacgtgaatgtaatcccggcactttggaaggccaaggcaggtggatcacctgaggtcaggagttcaagaccagcctggccaacatggtgaaaccctgtctctatcaaaaatacaaaaaaattacctgggtggggtggtgcatgcctgtagttccagctacttgggaggctgaggcaggagaattgcttgaacctgggaggcagaggttgcagtgagccgagatcgtgtcactgcactccagcctgggcgacagagcaagactccgtctctggaacaaaaaatgtgaatcatgttcatttgtctttaattgttagaaatcatttataaacagagcacatgctgtgtgtttgtcactaaagtgaagatggtcaaaagtaaaaggcaggggaaaaagggacatttagaaaaaggtaggaaagtcaagcaaaggtgggagaattgctattctcattgctattctttcatcttggaaaataaggtgtcaggaattactcctgaaagctgataaaacagatactgaaatatattcttagagttccaaagataacaaataaactagctaaagtcataaatataaatgccagacattgggaaaagagggtagcataagttagcaaaatatccactttccttttttttttttttttctgagacggagtctcgctctgtagcccaggctgaagtgcaatggcacgatctcagctcactgcaacctccgcctcccagatcctggttcaagcaattctcctgcctcagcctcctgagtagcataggcatgctccaccagttatttttgtatttttagtagagacggagtttcaccatgttggccaggcttgtcttgaactcctgacctcgtgatctgcccacctcggcctcccaaagtgctgagattacaggtgtgagccaccgtgcctggccacaagatattcacttttcaactggaaagtcaattggtgtttcccacagctgataacttgtcagaacagaggcatctatcacaggcaatcacagatgactgaatccaggaacagctatcagattttccccggagaggtggagaggggagagtgtaagacctttgccttgcatcatagcctcttttgttgttggttttttcccccctttggctatcaggtgatgtattacatggtacaaataaacatttttaaaaggcaatatgtctttgcagaaaacttggaaaatatagaaaagcaaatagagaaaagtaaaattactggcaatcagggataaccagttaggattcttattgttggtagatttcatattccattatggtcatttttcttaaataattattgtgtatacatttttgacattttcttttctttttttttttgagatggagtttcgctcttgttgcccaggctggagtgcaatggcaccatctctgctcaccacaacctccgcctcccgggttcaagagattctcctgcctcagcctcccaagtagctgggactacaggcatgcaccaccacgcctggctaattttgtatttttagtagagacggggtttctccatgttggtcaggctggtctcgaactcctgaactcaggcgatctgcttgcctaggcctctgaaagtgctgggattacaggtgtaagccactgcacccgggcaacaggagcgtgtgataagtttagatttctttgaaaatgaagttttaaatattatgtattaatatttacatattatcctccatcaccttatgcaccacaacatataataattcccctaatatgggatatttgggttgtttgcagtatatgttattatgacaaattccaaggtaagctttttttaaacataaatcttagtattcttaaaggtttccttaggatatattcttaggggattacagggtcaatatgtataaagatgtttaaagctctatgttgcaagaatgctttcagtaagactccacttaatttccttttctttgaaggtctactagtctacccattgtcatggtttgtatcctttggacctataggttatactgaaagttaacatgtaattatcagagatttgctatttatctgggagaaattccattattatgtggtgttggtagcacactgtaaatattgacctctgtagctaggtgtaaaaccacaggatttgtgaattcaaaccactaatgagtcctgaaaatagcaactcttaagaactgagtatagggctgactatcgtgctgagagcaggagggaagtattgctgactgtgcgaagactaatgaggtttgaagatcaacctcaaactttaccagcttatatcttcctcccctcccctcccttcccctctgtcccctcccctcccctctgtccctctcgttccctccccttccctctcctctcctctcctcttttcttttcccactatccctccatcctttcatccatctgtctatcccaccaagtttttgtttttttttttgagatgctgtctcactctgttgcccaggctggagtgcagtggcacagtctcggctcattgcaacctccgccccctgggttcaagcgattctccttcctcaaccttctgagtagctgggattacaggtgcctgccaccgcccctggctaatttttgtatttttagtacagacggggtttcactatcttggccacactggtattgaacacctgaccttgtgatccacccgccttggcttcccaaagtctcatcaagattttaaaaagcttcttcaaagtactactgcaggccaggtgtggtagctcacgcccacaatcctagcactttgggaggccaaggcaggaggatctcttgagtccaggagttcaagacccgcctgggcaacttggagaaacccttgtctctacaaaaaaatacaaaaattagccaagcatggtggtaggcgcttgtggtctcagctacttaggaggctgaggtgggaggatagcttgagcctgggaggtggaggttgcagtgagttaagattgtttcactgtactccagcctgggtgacagagtgagaccctacctcaaaaaacagagaaacaaaaaaacaaacaacaaacaacaacaacaacaagaactactactgcagcaatccctttcagtgcttcaaaagatcagaactttaccacgattgactcctatgaaactgaagctctatggggcattttgacttcaaaagcagccacacaaaatatacctcaagtaatccaaggacacaaggacacagacgatgtttgtggggaggctcagaaatactccccaacttctgagaacattagatatttttatctagagtgaagaaagcagaaaatgacaaaagataaaattcagataccagaagtttaagaggaccatatagaccaaatccattttgttccgggtggggcagagaggtgcttttatagagaatttgaaggcctctagaagcttccagtaactgtgcaggttagaatttgaaaaagtgcaaataactgagagggaatccatcttaaactgtagtgtcttttcaaactttttgtgagtgctctggttctgatctctctcttgtgtaggtgacagctttgctgagacagaggctttcttcctgtctcgagaagggagcatctgcaccattatcagttcctctgagttgctaattactttttggttttgtgattctctcaacaaaataacatatcaagagaggatgctgccaaggcctggctttacagttgcattatgaatcttcttggactgtcctctgaagttggccaggctcatcaaatatttataaactcagtacctaattccacagggcacctcgaaacatacaccatgaatgaggctatgggcctggaggctgggatcttcaagctcactgaagccacagggtgtccttataaaagagcttcataaaaatgcaaattaataataacagtagatcatcacttattcaacctccactttgaggatcgtgggccataattaggatgaagtgccaagaactgagccccagggagtttgtaactttttttactctggggtctaagggacatcatgggggctttttgagttgaaaaataaagtgaaatttgtgtctcacactacacctacagttccttcttgtctcgattgccaggaggaaagactgagatataatacctatcagagaatactgactgaaaaataattcacattaattcaacctatttatccatgatgccattttaatcattaaaacatggaagacttggccgggagcagtggctcacacctgtaatcccagcactttgggaggccgaggagggtgaatcacctgaggtcaggagttcgagaccagcctgaccaacatggcgaaaccctgtctctactgaaaatacaaaattagctaggcatggtggcttgtgcctgtaatctcagctactcgggaggctgaggcaggagaattgcttgaacccgggaggcagaggttgcagtgagctgagatcacgtcactgcactccagcctgggcaacaagagtgagactccatctcaaaaaacaaaacaaaacaaaacaaaacaaaacaaaacaaaacatggaaggctagaatgtcagaggtaaagtttggtgaagttactgggtcagctctgtacactaaaaaaaaaaaatgcttgaaaatcatccaggatgtctgctgggccatcttcagatggaggtggtgttctttggcaagtggtagtcaacacagcgggaaaaaaatagaggaatgaaatggatggtggtacaagatgatggcctacaattaatggagagggggcgacactgaaaatctctggggggcgagtaaatattaaaggtgattggattttttaaaatgagagaaaatgtagaaacaaaacacagtgtgaggttgagtaagatggagatgataagatagaagaaatctgggtggggacatgaagctggagcagacgaggggagtgcaaggcccagaatgtgctttggagatgaatggagaacttagggacaataaagactgtgtagagagagaaagatggagtaagaaaaagagagggactggcagctgcagtggcacatgtgcactgaagcaagctcgtggctactgctgtacctccatctctctggctctctctcctcctccccagcctccaaggggccagcatgaaaatgcagaggacagagatgtgtgctaagcacggcactcatatggtgtacccccagttgggagactaaagctgtgctagtaggggcataagatagctgggtgctctctggtgtgaatttggggtagaaaactaaccatctgacatagccgtagtaggtacattggtcgccttttccttcgtgtgcttggaggtagaagggcgaactgtttctgagagtggagaatgccctttccatcctttctctaccattgcatgacagggcatgggcaatgctgttttcttaggcaggaagtctatgtccagggaaggagcatgagagacaaggggactcctaaagggaggccggaaggagaggattctggggtggggaagaagcggacgcctccatcgggctgtatgccagcctgaggtatgaaaggctcaccacagggtcatgctcagaggatggccggtccttacaagggcacagggctgctgacgggatacgctgctatgtgggaggaatttgccaaatgacaaccttggatgaagaactgctcaagtctttttttggtgtccgttgtgagctcacacagaggaaacctacctaccaatgcagaaactggatgaacaggggagaagtcagaaagccctttattgtggatcacggggcagtgaggggtgccctacccacacatggcatccagcaggcaacagtaccctgaccttcctcccaagttgtagttagacatccctacggaacaaataagaaagggctctcacatggctatatatttagacaaatacacagatcaactgacgtattcatcaatggatgcacagataggcacattcatacctggaacctagtggggcacacattttgaaaacacatttttctgtaaggtgatcttgataacatccagtggtcactgagtgcctacttggacattatgttgagtacttcacatttaattggcacaatacccctttaggtagaaaccgtaagttgccccatggtctggcttgggcagtgatgcactagagtttgagctcctgctcagggtctcaccaccgggcatgtagccagatacagggctctagccctcggtgctgcagggcctaccccggaaaaaaccaccccctctcccagtttaatgcaaacaaggagagcggctggagtgaatggaaagcaccatcacactttgaggcagatgaaccttgatgaagatgagcaatgaaatgtattgtgggaagtcagtgatgctaaggagccatggctggaaggttctgccgaggcagcaggtgtggaggctgaggcactgaggggccacaccttgcacaggctccccagtttgtctccactggatgatgtaccccctctgtaaaccttgttttgaacacacctctccacgtaagagatgaaaaaaatattaagagaagctctagtatgttctccctgcccccgcggccctgcttgtgtgtcccgcctcacaccggggcatctgggagctgcagagatggggaataggaaaagcgatttcgggtctattggctcaggcttaaacagtgaaagagaagttggataggcggaacttgtataaaaaggtttaagggctttctcagtaagaggcttaatgagggctaatatatgccatctaatatgcagcatctatttttaggaaagcttgattttgctaagtgtctctgagatgttaggattcagatggtagggcaaatgacggctttggaataaggtgttcttatgtaaatccccaggctctgcagccaatgagatgacccattccaattacaagggggatatgggaggaggtagaggccccaaagggtaggatcaggggccggctgtggagccagctctgccctgaaggggctgaagcccacccggcctgcagctgcttcctgctgcaggacagccctggaaggtctgcagctcccgtcaaaggtattgtctccctccgtgtccactttgctaaactgtgatgtgatcagcgtaatcaacctgaaaatctgcagacatatcatgccagagacacagcctgcagcttaattttaagactgcttcactccatgattcctttgattcagctggggtgggagctgctgggaggtgatatgcaaatttatgcaaatgagaagcaattcagagtagctcagagtccagatcccttttgttcttggctgtagtgggattgggttcctgggctgaggagagcaggactgtcttatgaacatcttgcccctgagggtaaatgctatagtttctcaaacctctgctagttgttaaattgtctgcaagtattttgacctggttgaagctaatttgaatttataactaactgtaacagggcactgaaaaattaaattaattgcaactaaattgacttaaaaaagaattcaccaggttttagttccatttggacgttcagtcctattttgatccggtgtgacctatagtctctgtcacttttggttttttgttgttttttgagacggagtctggctctgttgccaggctggagtgcagtggtgcaatctcagctcactgcaacctccacctcccaggttcaagtgatcctcctgcctcagtcccctgagtagctgggactacaggtgcgcgccaccatgcccagctaattttttgtatttttagtagagatggggtttcaccatgtgggccaggatggtctcgatctcttcacctcgtgatccgcctgccttggactcccaaagtgctgggattacgggcatgagccactgcactcggccgtctctgtcacttttaaaaatgacacctgggaccttgacaggctgtagccctgaggcaagtgccatacctttagatggtctccagttctaggttctactaaaagaagacctgataaagtggctatattttaaattctggaaagcctggccaccccacgaagtccctggtgaaatctgcatgtcacttaggttggcaatgcctgcgccctccctagtggtgccagcaaggcagtcatttctctaacctaccagctgctcctgtgaaaagggagcattcagtgcagaaaactaggagggaaaggaactcacctccacttcctgggtgctgatgaaagatgctgacatctccccttcctctaggtgcagagggtgcaggcccatttcacaatggggaagactgatgctcagagaatagccagtatgcttgatcataccggtggcatgtggcagagaaggctgaagtccaggttctactgttggcaaagcttgggccctttccactctgctgtgccttcctcacctccacagtgacctggacatgaaaggccctcttggatgaactggtagtgtcactggcagcagctgctaggctaccaggctgggctggcttgccatcctggcttccccactggccgggtatgtggacctgtgtgatggtggattgtatgtgccaacttggctgggtcatggggtgccaagatatttggtcaaacattctcctgggtgtttctgtgaagctaactttaaatcaatgaactgtgaggaaagcagattgtcctccctaatatgggtgggcctcatcagttcattgaagacctgaatagagcaaaaggctgatcttgcctgggaggagagagttgcctttggacttctctgcaccatcagcagacagccttcagatgcctgcagtgtcagctctcctggggctccagcctgtggcccaccatccagagtttggaacttgccagtctctgtattcatgtgagcaaagtcccctagactttctctctctatacacactttgctggctattttcctctggagagccctgactcataccgttgcactgagctttttgacttttcggatctcccgcttttctgtgctctgcaataaatcacccttgaatcacagaaatgggatgatgaaggctggtggtctttaaactttagcaagaaccacaaccattcagaggtttcttaaaactcagattgctgggtctcaacccaggagatcctgattcagcaggtctgggatggggcctggaatttgcatttttacatgttcctgggtggtgctttgaaaacgacttctgtcaatgacagtccggaacaatgactgacctgctctaagcatctgataaacagtggctactgtgcatactgacccatatgttctgagaaatgtttctgttgtgggaggactagcagtcttgttgggattatttggtgtggacgcagctcccaggtatccctgaactcatttgcaggagtggtgacttcggggagactataaaggaagaacttggtacccacagacccaccctaatcaagcttgtcatggtctctccctgcttacagcacagatcttcacggattgcagcattcaggacctgagtccatgcccatgcagaggcccattgcagtgtttgcttagcatagctgcatttccagaatgtaggcaggagaagctgtaaaagattctcaccctgccatgcacactgatggctcacattctaaagagtcaggtgagtgaagtttaactggactttgaagactgaaaaatttttatgtttggtactttttagaataattgagtgtattttaaaactctgatcaaaaatcgtggctggtttaaggggttatgccaatctggattctattgtttcaaaaagggaagaaaatcaaagaggctagtctgaatcttcagactctttggagattgagagccagggcctatggtcccaaatttgggagaaaattcttttgagatgacacattttattttaaggtgcctttgtcaaattccacagggcatcaggagcagtgttctgcaccctgagggtggggcgttagctgtgcctgctgctgtgggattcctatcacaggggactgggtcaccatggaatgactgatgagctccttctctcctctgtgtccggaacataggcagcaatggcactgcatacacaagggtaactcacacagctgcctgcgaccacctgcccttcacagcccagatgagccatcattttacattagtaactgctttacttccccacgccaaaggcagaactagagtgctgagctgcagcaagtgaccccagtcccatccaagcccatggccgactcagacgcgggtgggcctgggcagctgctggcctccacagtgaggagagggacagtgagcgggtatgggcagagagcccatggcagtccaaggacctcagcccagggcagctcccttgacttcagggtttttaactgagcccattgttgggaagaaccctgggacagttgatggacacagccttggtcagtggctgcccagctcagaggctctgtggaggctcctggggacgggcaaggctgggctgctcgtgccacgctatcagggactcaggaggggtatagaccgggattaaaaccccctatttgattcctgctctcttcccaggcagggggagcttggatatcgctcagggtcgattatgtttaggattaaatggggatgctatagtcttttggggagctggcaagaatgaggactctgacacagcaggtctggggtggggtctgagggtttggcttgctacccagctcctgggagaggttgttggtttacaagccacactttgaatagcagggttctagtctccatggatgctcctcttgatagagacaaaagccaactttgtaatcctggatgtaaatttgagtagggaaagtctctccttgttttctaacttccgttggcactgattttcatctcttaatgacaaactctgtactgttaggggccatatgtatgtgtggcttcagcagtgcttggcaaaaatgtccctgtgtacatgaactcttgattggctgaatgaaaaaggtcagtgatgtctcccgctaaagcatttataggagcaaggcacattttccagtttggtaaaagaggaggtcaacctttgcatgtgggtctcgtgagagatttccaattcgttccagcgacaggccctggattcttagaacgtctgcctggtgacttaccagcttgaatttctcaggcctgcccgccaggctctcctagtctgacgcagaacatgtcaccaacttcgtggctaccatctccattagaggcatcgattgcttcaaatgctcactcctgatggaagccaagggtcatagtcccaagtccacactttctctcctctctcagtgacaatccagtcccagtaggacggtgaccctgggactcgagctgtgttcagagtcacctcttttcgctttgatgtgctcactttgcctgatttgaattcactcagtcttcctctttctctggcacattcaatgctttgggttcagttcgtcttgctacccaattccctccagggctgaccatttccaaaccttcaaccctcactccctttctcccaatcccactccagcctcacctactccacagacctttccaggggacgttcagctgctgcccttctctgtcctcccatggacatacattaccttcttcagttgcagctgaggtgtcttcacattgcactgttttctctagtgtgtttgttcacgtgtcttatttttggctttctttattagctggaagggccctggtgcgcccacatccctctccagagagttctgtctggtgatttgcacacgtgaggccaggagaattgccatgtaaggtctgagtgtccacctctagctctttcttgtctcttaaagaaacaaaatacaggggccgggcacaatggctcatgcctgtaatcccagcactttgggaggccgaggccggaggatagcttgagctcaggcattcgagaccagcctgggcaacatggtgaaacctcatctctactaaaaacacaaaaactaaccaggtgtggtagcacgtgcctgtaatcccagctacttgggaggctgggacacgagaatcacttgcacctgggaggtggaggtcgcagtgagccgaaatcatagcactgcacttcagcctgggtgacagaacaagaccctgtctcaaaaatataaaattaaatttaaaaataataaaataaaataaaataaaataaacaaaatacagggatgggggtgtgtgttgatccatgtggcacctcttagtgagactgcaacaatcccttgatccagaaataatccctgcttcttgcccctacatcacaatttacaatgtggcacaattattctgtagcatttgcatgttaaatgggcaagaaaacttaaaaaagaattcattgaatgtctctggttagaaaacaaagactcacctcctttgtcagagaagtgacctttagaaaccaggcttgcagatgatacaagataaactaagataaacttaacacctgcagtttacactgacattcacatttgctagccttagggactctctccaatgttgtgaggcttttcacatcacttgaaaaggagcaagaaagacctagaattcttgagtttcattaggaacctccagggatggagggggctgagtatttctatcagcctggtggcttggagccctgagctagtggccctcaaatattttaaggtcgatttgtgtctgtcctgaacctcattcacatgcaaattctttttaaatagaaatttgtaaatggcgtgcacacctctaagagcgctgcagctacttgtccagtgtcttgccttctttctgagttactgttggagccacggccaaaattagagaggcgttttctgtaatgctgagaaaagcaggaagcggtgagacgcttgtagcagaacacgcaaaactgtttggcggtggccccccctccacctcccacccaccgctctgtaatttccccaggcaaggctgaaggagcctttcttggaaaacccctgataacgttgctacacaaaggttgggagagtccctgacggcctgtgagggaccatgtggggctgggggtggataggggagcttgactctgcagtccccagggcagtctgagtccccagtgcctggcgtgggtgagctcagggctgctccgtatgggggcatccaggcctggctgctgatgccctgtggctgaggacacctccatctgcatgagccagtttggaagtccagcttgccccccaggcagtggaggccagtaagggcttctccccagattgaccactcagatcaaattgatccaggtgttgagacagaattggccccattttctgctaatttccattctctgattgtgctgcctgctacaggagtcattttggatttgggctgacctggtagacttctgaaagacagtgctctgggttcaagttgtcctcaggtaagttattacctaattgcctccagcaccatcccgttccaaaccctcactccctcttcttcctttcccactccagccttatcttctctacggtccctctgcaggttgcgtccagcagctggactcttctaagagcgtggtatcagtgcaagatgctatttggtgcttcctaggtagatactgtagtaagtccaggttttatgggactgatgctggagtgcctgctatgagaaagaacacagaattacaacacaatttacattcccccccacccccacctctaggaggggttagaatgtgaactgctggcagactgaacccactgcagttcaaatcccttactttgtcaaatttaagaaaaggtataataatgattatctgttgctaaggcacctctcaataccatgagtggcctgtgtaggtgaagggtctttaggcctagtcatcatcaaggcatggaggggtccgtgtcatagctagtaacatggttctagaacatttcagaagcaccaacaccatgctttggccatggcatttattttaaaatagtatccccatatgtgatagcaatactagaggaaatacgtaacagaagggatcttcccacattccatcatcctggcaaaacagctgctctcttctcagtacaaatgcatgtttctaaacagttgtaatgacaaccttggagtgaggaaggcctttctaagaaagacacaaaaacctggaaaagattgacacacataaaaataaaataatgtgggcaacgcatttccaagtctaaagacaaatggaaatgtgggaaaatatttacaactcatatcgtagacaaggagctaattttcctaatttatgaagaactcctataaatcaataacaaaaagaccaatagttcaaaaggattaaaatatattaataaaagttttcagacaagggaatacaaacagttttaagcacatgaaatatgtaagagctatattgaaatttttaaagagcagggttttttaaaattttatttttattttttgagacagagtttcattctgtggcccaggctggagtacagtgtcgcgatctctcagctcactgcaacctccacctcccggattcaagcaattatcctgcctcagcctcctgagtagctgggatcacaggcacctgccaccactcccagctaagagcagggttttttgttaatgtaggaaatccgaaggcccaaattctttgtggaagaagaataaaactggactactcactctgtccgaaggaaagatctgttagaaagctagaggaattaagacggtgtgatgtttgcacacgaatggacagatcagtgtaaaaaaagacattgctaacttaaaaatcacacaatctataagtttggaaaaggagacttgatggttacagccatcaacgtggccatcccttagaccaggaagcttgcctttggccaaagccagagacaggcactctgaaggagagattagggcagcagctttgtgctaaatgggttggataaacatgcatcttcaacaggttataggaggagctaggagtattcatgaggtggtcctgatgcatgtgtgctgaacccacatgtatgtaacatacaacttatgtctaccttggggtggagactgaacatttaaatgtattacagtcaggccctatacgtcaagaggtattttcaggacatgaagggattcaagtgcacagcctctgtaaaccagccagagccagtgctgtagttgtggctggtggaacaggcgttcagttactcagcctcggtgagctggatgggttgtaattgctttaatattgcttatctcaaggctggagcttgtttagctgctagagaaagagaaccccaaaaggaagagagtttaatgagacatgtctgaccacctgtcccatcatggaacttagtttttaaggtgtttctggggtctccttggccaagagggggtttgttcagtcattaaggggtttagaattttatttttagttcccaaatatagggtctaggaacagttatgtatggttatttgtatggatacttgatttatgcaaaaaagatactatagtacagagggaacattttcttccctcaataaatgaggaataaattttctatccatatagaaaatagttcatctgactcccacctcctttcaaactcagaatgaattgcagttctaaatgcaaaaggcacaaacaacaagactttgaaaaatagaatatttttatgaccttggagcaggcaaacatttcttaatcaggacacaaaaggttcaaaaaggagaaatgttgataagtaggactctattaagattaagcatttctgttcctccgaggataacattacaagatttaaaaggtaacctcagaatggaaggagatatttgcaatacataaatctgacaaagaactcttaatcaaaatatacaaagagctcttacaaatcaataggacaagacaaaaaaaaaatcaatgtgaagcattggcactgcccagaaaaggaaatccaaatgtccacgagcaaaaagaggtgttcagcttcattagtcaccggggaaaaccacaaggtgatatcctcatgtacagccacaaaattggccaaagtgaaaaaaatcccaaaacttacaagagccagtgttggtgagggtgtggagcagccaacctccatccactgctggtggagggtacgcactggtgcagccaacctcgaggctgtttggcagtttccactaaagctgagcacacacctgccctgtgactaggagaaacagtgtctggaaggaatcaagaatgttacgtgaatgggttcactttgtgcatgcctcagtatgtaggatatacttcaataaaaagtttaaaaaaaaagagtaatgaaaaaaatcaaactttgcagaagtttcagaaatgttttaaaaatgtggtaacacttgtgtagggaaataggcattcccatatattgcttagtataaatagtttaaacaaaaacactggtcactacccactaatatttaaaatgggagttaaaaatgatgcaccaactgagaaaggtcatttggcattctccatcaacgtaacaaatgcagttcgacccctagttacctctagagagacttgcgcaaaatgatgttgaggaagagtccaactctgtaaaatatttgaagagatttattctgagccaaatatgagtgactgtggcctgtgacacggccctcaggagatcctgagaacttgtgcccaaggtagtcggggcacagcttggttttacttttttttcttttttttttttgagactgagcttcgctcttattgcccaggctggagtgcaatggcgcgatcttggctcactgcaacctccgcctcccaggttcaagcgattctcctgcctcagcctctgtagtagctgggattacaggcatgtgctaccacacctggctaattttgcatttttagtagagacaggatttctccatgttggtcaggctggtctccaactcccgacctcaggtgatctgcccatctcagtctcccaaagtgctgggatgacaggtgtgagccactgcgccggccggttttacacatttttgagagacatgagacatcaatcaagtgcatttgaggtgtacattggtttggtctagaaaggcgagacaacttgaaggggttgggggaagtggggagcccttccagttacaggtagatttaaaagttttctaattatcaattggttgaaagagtttatctaaagacctggaatcaatagaaagcaattgtctgggttgagataagggattgtggagaccaaggttcttattatgcagatgaaacctccagagtaggaggcttcagagagaatagattgtgaatgtttcttatcagacttaaaaaggtgccagactcgtagttgactccctcttggatcagggaaaaggtctggaaaagggaaagggcattctttatagaatgtagatttttccccacaagagatgactttgcagggcaatttcaagatatggcaagaaaatatatttggggttaaaatattttggtttccttccttgttacgtgatgttatgccagagtcaggttggaaagtaagccaccacgttatatagggttaaataaaatccctctgatgagactttatggtttgtagagtgtgactctccaggccccttaagtaggaatttgggcaaaagaagacaaacagtcagcatttagtcttcagtgatgtcactttgtgtgtaaagcaaaactttgaaaacaacttcaaatgtctcctgttaacttaggaagattcattgaatagttcttcattttgcccctacgtgggaagaggagctgagctcagtgtgtatagtatggtttttgggatagatttcctgtaatcataaacgtcttgattctctgggttctttccagtcactaaaggctatcatgagtgttaataattttgaaaatagattagttgtgtaaatgaaaatatgtaagccaagcaacttggaaaggagtgtttgaaaaatttaacatatatgcgtgtgttatgttgctaaaaagattttcccttccttgtaaaatgacatagaattttcagagatataaattgattatttttgaagttaaaaaaatcattcttatataaggtttggtcacaagaaattgcattgttttaaaattttttaaaaagtcatctgaggagcaacagaacattacatcttgcagaagatttgaaaagcatttggtggacatgcatttgctgaattgtccccagggaagatctcggggaaagcactgactataaatctaggctgcagttagtttctgttgacaaatttatccctaattgctacattgaaaatttgtcttcagtgcccccttgtatttgcatctggattgtgtgcggtgaaatgtccattttcatatgttaaacctccccatggaaaggttgaatcatgaaaggcagagctgggaggggtgtagattgctctgggggttctacctggtgccagttctgtgacagagggctgggagctggggctggtctcgggaagtcccaccctcctgcttctcctctttcggttagacaacactagcttgatcactggaggaagaacatctccatctccttattcttcccggggcccaaaccagggggtacttatctggcccaatggtgaggcacaagcacagagggaggtgagggctggagcgtgggccaggtgcctccctgaaggccgggtcttccatccttctcatcactgtgggcttcaggaacagggttttaaacttttggttcagagccattagtgggaagtgaccagtgtttttgtttttgtttttttaatgtgtgggagagcagagcagagtaaacaccagtgcattctgcctgtgggaagtccgtgttttgagccttctgtccttggcggacagccatgtctggaggtgccggctgacaggcaacatgcatttctttctttctttcccttcccttctttctttctttctttctttctttctttctttctttctttctttctttctttctttctttctttctttctttccttccttccttccttccttccttccttcctttccttcccttccttccttccttccttccttccttccttccttccttccttccttccttccttcctttttttttttttgacagagtcaaacttcagactcacctgagactcaccctctgtcgccaggctggactgcagtggcgcgatctcggctcactgcaacctctgcatcccgggtccgggttcaagcaattctctcatctcagcctcccaaatagctgggattacagactcgcgccaccatatccagctaatttttgtatttttagtagagacggagtttcaccatgttggccaggctggtcttgaactcctgacctcgtgatctgcccgcctcggcctcccgaagtaagatgcaattctttatggggccagagagaagttcaaaagccactgttctagaaagagttctctctggcattttattgaagcaattgcaagtttgaagtcagtgctagcagtgtttggtagtcaggccaccagtgagaactcagcttcatcattccggaaacctctgtgctttgctcccctccatggaagagcctcaccagtgagccatttgggttctcttaaaatgagacagaacatcattgcttggtgctgatcaaggaacacaactctgtccttcctcccagggaagcagtcgccataggctggcacagactggtggggtcagccctgcatggtgaacagtatgggtacccacccagtgcccccacccagaggcctgtcatcaagagagatcagcctctgagcagccagttcaggggacattggtcattgaggagatgaggtgccactgccacttccccactcctcacctgggtggcctcccagctcccacctccttctttaccctccagacctaatccattccccactgggtgtgtcagaccacaaagcctcctgcttaaagccattcgcaggctcgccactgctcctaatgcctcccggtgaactccttgctgctgtccacatggccagctcccctggccccttctgacctgctcactgtctccccagctgcccacccgaccccaggccagctcatgccgcctgagcatctctgccacactgcttctgcatgcttctcctcacctttgcatgcccggctcctggtcacctgcatttcagctacacagtgcctctttagagagcttccctcctcccatcactcctgaagtcctgtcctctcattgacttgttgtcctgttgatgccctcttcactgttctggctgactatggctgcatttaaaagcacctcaaagctcagtggcttagaacaacaatttgttattctctcccatggtgctgtgggtagattgggcttggccacaccatcctcacaatggtgaggcttcagatccaatcagacagtgcccagacctggagtctctgaaacctctgctgagcggatgtccaagatggtgccttcatctatgtgcctggccaaagatgttggctttcagctgtcctctcggcctgggatctcaggagtgcccgtatgagccctctccactcagcctctcctagcatggtggccaggtcccaagagggagcatcccaagggccaggtcccaagagttgacaaggagctgcaaggcctctggatagcctgggcttggaagaatcagaacttgtattggttgacaaagtcacagaggttggcccagagtcaagtgggagagatgaggcccttgaaagggactggcaaggccacaccgcggaagagacagtgggatgctagatgttattcagccatctttggaaaatgcaacctgccgcttcagactcacctgaggtcattgcttccacttcttccacttctttttctttttttccttctttctctttctttctttctttcttttctttctttctttctttctttcttctttctttctttctttctttctttctttccttctttcttgtcttttctttctctctttctctctttctttctttctttcgcccactccagtggattggaagcaagagccttgtctaaataacccacagttgggttccatcacctggaacatccatgctaaagtggaaaaaaaaaaaccatgaaactttcctgttgagtttgacagggatataaactctatctgattaatatcaaagcaatacgtctcttggccttagtgccatcttcttggaaacctctgcaccgcgagagccaagtggagaaagaagcaaaagcacagactgaagctcaaaggaagaaagatgaggcagaggtccaagtaaaccgctaggtttttgcacccatggaggtgccaggagcagaaacatgaatgccagaggctggagatgctggtacaagttgttggactgcatgctactgtctagagcttgtttcaatgcatctagaacttcatcgccatctgatcgccaagaccacctctgagacccaccttgctcatgtccataactgtccatgttagtcctttgccctggacctgtgacactctggactatttctgtgttcacttgtggccgagtataacaaccgtagactaaatcacctcttctgctgtcttagctgaagaagcaatacgtttggagggagaagcctaagtagccaggattgctgttaaatatttaggagcagactgcgtctgtatcctcatttattcttttcattcaacgcatagtaaatgacattcctaccacatgccagtaacagcactgggttctagggattaaaacaaatgtgaaagagcccctttcccgcccctgttctctctgttggtgaatctcatgtgacctccagtagtgacattacttaccctttatcaagcatgtgctccatgccaggcattgcactgagatgggcgtgcacattgacactggttttttgaattctgacaacgagcttgtcagttggttgtccacatttctttatagacatggattgtggcctttagagaggttgagtgatgagctcagaaatctacagctcattttctttacgattacagcatgctgccaccaagtactggtacccccgtcaatggtagctgttagtgttatcgggcctgctgaagtcacgtggcctctgctgctaccctgggccatgcacgccatgttcgcgtggtggcttggtgggggtcccgtgggcagtaggtccagtgcgaactcatcttatttcaacagtcaagagtcaaaagaaaagagtccgaaaaggaaatccaacctatgactaagaagtccacaaagtccgtcaggggctttgtgtgaaaaactaacctgcttagtgtcaagcttgtttattcttggctaaaaatgacttcctgtttctaagaaaagaggcctctggtggatagaaaacatttcttacaaaacaacttttgctgagctcaggcccagtgactcaatgccatgtggattatatttcctataaaatgctccaggctgaaaaatcaagggtaaaagtattggacaggggcttctggaagtgggttgtccccagtgtagacggggctgtttccccacactccttcctggggagatggagtgcccggtcgggggagtccaggcagcgaggatgagaggccttgctttccctttgctctgggggcctggggttgtcttcatctgctagggtctctgcaacgagcaccacggaccattcaaggcagcttaaacaaccacgtcacagcttaaacattcattgtcgatcgatgctgcaggtgagatcaggtaggggctggggctcttactgaacttgtaccctggcctcttccccttccctgccccacacctctccctccatttttgctatccaggagcaaaccctttagaaatcacatgaatccatgcttgagctctgcttccaggagctggatttatggcaccagcgtgatgccgggcacagagtaggtgtgcaggaagttcctgtgagtgaacgaggaggggcacttgctctctcagacaccaggcaagcttctccccacacgagagctctcagattccccacaggtcctgcaggtgagcagtttgtcctcacattaccaaggaggggtaaaggaaaggcgagccatttggccaggctgtggcaggccagggatctcaacacaggtctgtgtcaccacccaagctgtatagctgtccccatggcctaggtgagggacttcacctccttgtgccttggatttctcatctgtaaattgggaacattgtttgtttgtgacgatttagtgcagaacacatagcccagcagtgactgctagccctgagcgatggctcagcacgctggggaggactagaccaatacctctgtacacacgcacacatatgcgcacacacgccactcactacacacccatgtacataccccccatgcacacatgcatacacacacacaggtacatccacaatacacccacatacgcatatgtatgcacatccacacacactacacacccacacacgtgcccaacccccatgtacatgcatgcacctacacacccattcacacaccctcatacatacacacattcagccacatccacacatacctatgtacatacccacatatatacatgcatgcacatacactacacatacacacacacatatatgcacacaatgcatatacactcacacacatatgcacatacaagcacaccacagaatgcacatgtacacatgatatgcaagtacacagtacacatatatatgcacacacatgcacacctacatatctctatacacacatacacatagaggcagccactcagaacactggcatgtgggttcaattaattctggctcgtggcaatgttgtttgtttaaggaagcttacggtgaaaaacagtgtcacaaagtccctgggctccctcctccctccgcggccagagctactgttggagcacacgtggggcagaagcacagctccatgcccatgcctcacagaaggtgagcaggcagctctttggagaacttgagggttctctgggtggccctgggcattaggtcccctctgtcagtccttgccacatggccatcccctctttgctggttgctggggactcacattgagcactgagaaaagcccctttgctccacccctgtctagggaatgcagggactttactcctgctggggcatttcaggagcctcatgcaggggcagaaactctggtggctgctcccactgccggatcacagttggtgctgtagtcctccaacctggcctggtctagagcctcatctggcttttttgaagtgccatcttcagcttgaaaacagagcctgaggcaaaggctcctgtgatgactgcagggagtggaagcccaggaaagcagggtgaggggcaggggcagggtggggtgtcctaggaggacaagcagccacatggccacaggcacctgtgcctcttgtggggcatttcagataggccgagagaacaactgggcttcagaacagcccagcagtggggcaggggagggagggaattccctaccaggcatctctcacctcatcaagacccccatagcattaattctcctacactcaccctggggaagccagagcctgctgggttcaatctggctgaggggtcagtgtgcaggtgcggtggcccctctctgctagtggacacatgaatgggctctgagatccctagtgacagtgacattgctctcagggaccagggaggcatggcataggtatagatccaaggtgtcatggtaacagaagccctcacgggagctatggggagctatggggaatcagaagccattgccctcacctccattcacaagcagcagtgtccataagaaccatcttggtcctagtctgggaaggtcaggaccaccccttgaacctcatttcaaataagcattttcagtgatgtggattcctgggggtcacaggtgagactggtccaaggtcattacttgtacccaggtaatcccctattcccctggaaagtgggacgttttagtcatctatttctgcttaactaattataccccaaaacacaatggtttgaaacagtagcacttattaccacccagtttctgcaagtcagggatctgggcatatacaatggtgcacaggcttacctgggtcccctgcttcagggtcccttgtggtgttgactgggactgttgtagtctttttttttttttttgagatggagttttgctcttgttgcccaggctggagtgcaatggcgcgatctcggctcattgcaacctctgcctcctgggttcaggtgattatcctgcctcagcctactgagtagctgggattacaggcatgtgccaccatgcccagttaattttgcattttcagtagagatggggtttctccatgttggtcaggctggtctcaaactcccgacctcaggtgatccgctcgccttggcctcccaaagtgctgggattacaggtgcgagccaccgtgcctggcctgttgtagtcattttaaagcttgaatggaggaagctctgtatctccgtcagttcaggctgccataacaaaacatagcacagacttggtggcttaaaaaatagacatttatttcttacagttctggaggctggaagtctaagattgtggtgctggcagattcagtgcgtgttgaggccccgcttcctggttcatagatggccatgttgtctctgtgtcctctcatgacagaagaaatgagaaagctttctgaggcctctttcataaagacacttaatcccattcataaagactccccccttatgacctaatcacttcccaaaggctctacctcctaaaacgatcacgttggcattaagatttcagtgtgtgaattttggggaatgcaagcattcagtccattgcatactgcatccttacaagcaggttcagttcctcccagcctgttggaccgagggccttggctcctcattggctgttggttggaggctgtccttggcttcttgccctttggatttcttcagcatgacagtttgcttcaacaaagtgagcatgtgaaggagagcaagctcaagcatgaggaaagtcacagtgtttcatagcgctgtcttgaaagtggcctcccatcacctttgctgtgttttgttcattagaagctacccaccaggttcagcttcctacctccgcaaagagaaagggtcattagagtgtaaactctaagaggtggagacccctgggaaccatttcgggagctgcctaacttaggctgttcctggctcttaataatttatgtcctacaaggtccccccaaatctcattacattacagcaccagctcaaagtcaaaaatctcatcatttaaatcaagtccaggggatgagtgaggctccttagatgaggttgcctaagtacagatcctcaagtacagcacttttcagtcttatactcatgaactcaagacaaaagttatcttcccctcactcactctacatgcaatggagggacaggcatgggataaacagtataatcttttctgttcataaaaggggaaatgggaggcacacagtaggcactgatccatagcaattctgaagtacagctgggaaaacattggaatttttttggttaggtctcaaggcctgggaatcattctctgtggctcttggctctaccctctgggctcctacttttgtccttttagtatacttacttttttatgaaagacaaaatgtgtttgcctctgagcagttctctcagcctccttcctgccggtcaaacgttgaggtccaattgcctcttttcattttgccctggctctgtcccttttagttcaagctggaagtgcttttgctgatgtagtttttttcagacaatttgtgggttttctatgaatctcactggaacccacttcattagataaattaaactgtggcttcaaagccacagttacctatctctttgagatgtgttcctctctaatttggacttccgctgagaaaggttagggacgacacccttatgctttttacagaccccatgactcaatagagaggaattgtgggtacacaattttttaaaagggcccttcaggtgtctcaattgtactctgatattatgactgttctgagattttaacaaaagattgcacaatcacatattgcctttatttctagaaaattttgaatgttgcttagatattcttaattttagcatcttttgctatttgcaaaggatgagaattttctgtgtcatcaagtctttctaacagttctttcttcagtttcactttcccctctcacattttattataagcagcaagaagaaccaggtaatgccttcaacattttccttgaagttcttatctagactacacagtttgctaggtccaagttctgcactccgcataactgcaagcagcagtgtagctaaaccttttgccactatgtgatgagaatccccttcctccaattttctataacatgtccctcacttcctcttgaaccttcactggcagtgttcccaaagctgagatttctgctaacaatatgtccaaagcagtttaggctttctgtatcacacacctgaaaatccattcactttcatccactgtccagttttgcagccacttctgcattttcaggcctttttttttttttttttgagacagagtctctctctgttgcctaggctggagtgcaatggcacaaacttggctcactgcaacctccgcctccccagttcaagcgattttcctgtctcagcctcctgagtagctgggattacaggcatgcaccaccacacccagctaatttttgtatttttagtagggattgggtttcaccatgttggtcatgctggtcttgaactcctgaccttgtgatctgcatgacttggcctcccgaagtgctgggattaaaggtgtgagccaccatgcccggcctcaggcattttttaccgcaacattacattgatactaaaatctgtctttattatctattgctatataatgtattaacccaaaacactgtatcttaaaacaatcatatctattatctcaatgtctgtagctcaggaatctgagcaaaacttaactggatcctctgcttcagggtctggaacaggctacagccaaggtgtcagtcacagctctgtcatctcaaggctcgactagggagggatctacttccaaactcatgtggcttctcgctcataggctgttgaacagagggtttcagttccttgccacatgggaccctccagcatgacagcttgcttcatcaaaatgagcaagctgagaaggcaaaagacagtgaaagcaagattaaactcagtcttttacaaggtgaccttggaaatgacatcctgccagcttcgtcatattttattaatgtttattcatttcatttatttgtcattcactaggtccagcttatgtgcacacacatacatgcccacacacaaacacacatacatacactcatacactcacacatacacacatatacatacctgcacacacatacactcatatgcattcatacacacactctcacgaacacatacactcatacacccatacacatatttgcatacacactcattcatatacacacatatactcatctacacacatacatgcacatatacccacatacatatactcacacacacagaaatatagtctcacacatacactcatacacatacatatatgcacattcccatgtacatccatacacatttacacgcaccacacacattcatacacacatagacacccacacacccacacatgcataattatacacttacatacctagtcacatacacatagacacacacacatattatatatatacacacacactcacatacatacacacatatatacctcccccacacacgtggtcacacaaaatatgcctagatgcatgcatatatggggaaggtatgaatttttggagctaagaatcattgtgagccatttcagaaactgccacagggcctaagacataagaggtccccatggagatgcctcctctgcagtttttggggcaggaagcatatactactttgtttcatttctttgggggaatggagccttccccatacctgtggcagtagctgtggaggcttcacaaggcttcatgtccaagagggcaccctctcctggctgtaagttggtgctggccgtggctgggagctcagccagggttgtgccacagaaagcccctccttgtgcctctgtgagccctgggcttcctcacaacatggcagctgttctctcagagcaagcgttttgagggagtgagccaggctaatgccttggcagacatggcaggccatgtctgctgaaccctgttgagggaggcaggcacagaggttccctcaggttggcagcaggacctgggttcctcctcttgaagggtgagtggcaagttcacagtcagaagaacatctgaggtagggtaggctgccaagatccggtggggaatacactgttccctactagctaatggaatgatgtaatccccccaaaagagtgagccggtaactcattactttcgctcccaaagagcacatgtacaacctactaggtaggttggggacttggactcaggaaggcctctaagggcaggggtctggccccagggaagtgttgtgggcaattcttttagggacacagaaaaatcagaaagagtttggtcagcacatgaccacactcaccccacttcagtgaaggtaactgactcacctctgagacttgccttcagccagggtgttcagggcagtgattgacaagtggagaggtatcctcaggggacaccaggacattggggtgagtcactgggcagagccatcagagtgatcctggtctcctccactcccagaggtgccaaggttgcaccctcgctgaagacaaggccctggggcacttggctgaggccactggactgggctttgtggacattccattagctagagggaagagagtcgtgtctctaggttgtttctgagcatgacaggggccacgttccttgaaggtggtttgcagattccagcagggagaaagctgtgctgggtggtccctgaaggcctgggaggcaacggtggacatcgtgagaccagctcgagctggggtgtggggcctgagttgagatcagcagaagggctgctttcctcccacattccaagtctgcaacttcagggctggctatcactatctggccctctccaaatcctcaggggcattagggtcattgcctggtgtgtaaaccattaacaaaatgtagtaggttgcaaaaatggcctcctcagcatttcatattggctccttcgtatttcatgtttcccaatatctcccagctgactgccctgcccactggcttcctggctctcagaccctctgctccagcacaggcctcttgctgtgactcttctccggtaccgtcttagcaatggttttctccacaaactgagcaaaagcctttatctgctttcaggaactttgggaaactccttcaactggctggggagaatattttctggttttgatcttttccctaacaagcttggtgtgttcaaacaactctcaacatctcactgtgctctatcttcctcttttataaaatgacaatcatgctaaccagcctctctatctgcagggctggatgatccatagcaaatatcccctgatggataagcattgtgctgagagacttgcctccatcagctgtgtaaacctcaggatgacctgcacacaggtatactaaggcacacagagaccagctcgtagtcagtgacaagtaacttgccaagagctgtggtttaaaagcatgtctgcaaattcttggacactcttgtcatccagaaatagagtctaaccctcctcccttgaatacgggctggcttcagtggtggaaatgacaatgtgtgagtttgaggtttgattagaaaagatgacacagcctctgcctgactctcaaggcccttgttcttggacattagctgccatgctgggaggaagcccagcagccacacagagaggccacgacagccgaggtcccagccaagccagcatcaactgcccaacacgtcaatgagtgatcctgcagagcctcccatctcctagccaccgcagctgatgctctgagagcggaggcaagctgtccttgctgggcgctgcttaaactgcagatgtatgaacaaaataaaaatggtggttattttaagacactacattttgggtctctaggtgtttgggggtggtttttctctagcaataggtccccagtcttgtgcttttagggtccttgtcaagaagaaaagtacaatgaggaggcgagccatgtgccccttactctatccaggtctgctgcctaatgttcatcccacccaccctcataaagctggagcctgaagcaggctctgagggctgcctggtgctaagtgctggtatttctggtgcttggttcaccgctgctccctggcagtcactggaactgcttagctcagtgcactgaacccacatcattagaggaaaggaggtggctaagggcatctcaccacaccacggggccactaaagccaatgcctgggcttggaaggcagtattatcttcctgccctgacccccagcatcttacaagtattttcatcttcacaagggagcaggaggaaagcagggacggggctcagttgtcgcgtggggattcattgttgcagctcttcccttcctggctatggggctttgggctgaagcatctcagccccctgtgggagacagatctcaggtctttaatcactgtcacctgaaaattcagggacagacacctgcaaatattagctgaaaggcgttctgtgttgctgaattccacaccagcagtacccggacttatcaaggtgggattcttggtgtgtgcagtccaagagctgaaggacttcaagcactgttgatggcaagtatatgatggatcatatcatacatttgcgatgtattttttcttttttaaattgtagtgaaaagcacacaacataaaatttactatcgtaaccatttttaagtgtacagttcagtactgtgaaggacattcacattgttatgaggccgatctccagaacttttttgtcttacaagtctgaaactctatacccactaaacagctaccccctgttccatttttggaaaccaccattccactttccatttcccatctctgtgaatctgactcccctaggtgcctccagtaagtggagtcatagagtatttgactttttgtgatctgcttgtttcactgagcatcatgtcgtcatggttcatccctgtggtagcatgtgtcagaatttctttccttttgggatggagtaatactccatggtgtggctagaccacatttttttcatccattcatcagctgatggacacttgtattgcttccacctgtcatccactgtgagttacactgctgtgagcatgggtgcacacatgcaatgcattttttgtggtctgtaggtctctggggatggccccttccccctgggcagactaagggcactgtgggcccctagccctcggccctcctcgggagtttcctggcaggacagacatgcacgaggcctctggcctccctggtagggcatgctggagcaacctgggcagacgctggctccagcagctatcagatttcctcacatttagaggcctaagggccactagatacagtccatgaattactccta

SEQ ID NO: 657 - DNA, 49421 bp, Homo sapiens
  source 1..49421: mol_type = genomic DNA
tgaagtggtacactttgccactttcctgtaaagccatttggcattatcttggcctggaaatctcatttctaagatattctcatcatggaaagtgcagctaaagataaatttaagagaatatccactgcagccttatttgatagtaaaaatttacaaaatcacctacatgtcccaaaataggggatttgttaacaaattacaatacacacatctggtggaatattatgcagccattaaggctttctgaaaaatattccacaatatgggtgaatgcccacaatgtcataatgagttgaaaagaacagggaataaaagtacatagaaagttgttcacaatctgagagagagagacgaaaaaaaacagattggaaagagtattcaatattaataccagtgcattcttgggtggctctgcaaggaaaaaaaatgttaacactgatcatttccggatgggagaattatgggtgctttttatcgtcttgactatacttttctaaattatacaaactcttaacgatcgatatgcatttcacaattaattggttttaataaaaaacgcgagttagtgatctgtttctgtatctctggagcacaccccgagacgacacagctcagggcatgtcctggttaaacatttgcaaagaacgctgttctccaagttgggcagtggaaggtgtacagtgtgtcaagagaaaaatctacgtctgaggagatatttgtgacagcgacccggacgcggatgtgtctgtcgtccccgccgcctcctcctcctccccgcgtggtacccacctcaccccgttgggcctcttcctcaagttctgtacctctctggtctcttccagttttaatctttaaaaagaagaagaagcagcaatgcataagctgagtgattccccgcggaatccaaagctaacagagccaataaggcaccttcgagggcatcccagcccagctactgagccaccagcacagtggtccagaggacgaccttgtgcctagacccaccgggagtcagagccactgcgcatcccggaggcatctctctcaaccgttcgagcttggggcggtggcctcaccccttgagcctcaatttctgcgtccgcagaaggaaccaccacccgagctcacagttaacaatgtcagcgaagcgccgagccggtggtgagtcccccaaacaagtctatctttaccaagcctatgggagccccgccccaaacgcaccgaacctcctctgagtcctgctcatcttcctctgactccgagtcgccccggcggcgacggaaaatcttccggacgaccggcatggtgacaacggccgagttgtacagccgccgcgcctctgcgcagcggcccaggctgcttccggcgcgcggcagagcggtcagagcgcctgccccgtctggccccgcccccggcacgcacagtccgcgtggccacgccccctctcctggcgtcagcctcttccgattggacggcagagggaaggaggtggggcgtcgccagacggccccacaaccctgcgcgtcgcctcagagggggcgcgcttgactgacaggcggcggcggcgcagttgcgagtgcaggtgagttccgggccgccaccggctgcttctgtgggccgggcctctgagcattggcgaccccagcccggctccgggctgacagggcctggcttcgccaggtacgccagacgcagcggcccggtgagcggagcccgggacccccccggccgccgccgcccctctcccctcctccggtcggcgcccaggggggcctctgggccccagcaccaccccactctgagctccctgggggctcgtggcttctccagaaccggggccgcccccctctcatttctgccggggcctgacctagcgttgaaagcatccgcgtggcgtctcgcgtctcgggcgctgacttttctttcctcgggctctgagccctgacgtgcgtttttttctttcggaacaaaagatgaccacttctctgcggtgctgacttagagtcccagcgccgactgcctcacaaataatggcccccagcttctccgcgaggagaggcgcgtctgatgttttgaagccacgcaagagggtttgagccgggggactcctcctcggtgcttgccggccacccccctggaccttcacgggtctggttttcctccttcggcaggtctgtcgctctaccctctgccccttccaccccgaagatgctgtgaggataaagtttatttgaaaaactggtatcagcaaacgcttaggaaatacctaaatgcataaataatggcttctaggacttttaagaaccccttaagtaacagtagttttccttttctcagtgtcatcccttactttgagaactacctcttattaagcagttactatgtggcaggccctgggcaaagcatcatctcattgaattctcccagcaatcctttgaggtagattgtttttcgttttacaaatgagaatgcggagtctccgaggggcagtgcacgcctcaagttacccagctaggaggtggaacaggaattggttgcaggtcagtctctgccgcacggtttgcacagggcctggcacggtaggagtgcagtagatgtttgctgctgctgcagctgctgttacatctcattggctagggggaggggccgatgggggctgtctggggttcccctttctggaagaccattccgaagcagggcagcatttctagaatgccttacgttttctctggaacagtctccactgagattgttcttctcttccttgggctggaaaaaatagtagactcgggacttcttgcaccagcgttttatctttggtcaaaagccatatattaaagtctcaaagtcttgccctctgcagactggttcagccaaacccagatgcacgtgcactcactggatacggagtccctgtcagatgatggagaggctccttgggaattgctgcaggagtccagggggtcaacgtctgcagctctcacgctctcagaggtggctctgaatctgcccatcaagcagcccatccaccagggggtactggacactactaaggaaagggcaagaaggccaggggcatttctggaccctcctcctcagctgaagtcccagggtacagatgagctgctcccacccttgctccatgaggccagaggacccagtgataaccaccacctgtgctgtggcagatctaattgagtgctctttagcaaaaggaatgctgaaaaagtggcagctatgaatctggcagtaagtggctttgccaagagactgcagcccaagtctcactgggcccttttaagcgtaggatgagactgtctctcaaaaggaccctccgagaaatacaggttctatgcagttcaaagatgaatccaaggtcttagtcttgtttgggagttcagttgttttaagaaaatgtacagattcaacctaggttttggttggtttcctagctcctttctggagccagatgaaatgttggcttgtttcagggttcagggagcattcatgtccgattggatttgggatccagcaacgtgatacagttcacagcccagctatagtcggcatccaataaatgtatttattggatcaatgtattcaacagattcttagcatttactatatgagcaggcactgttctaagtgcttgaaataagtcagcaaaagagacaaaagatccctgattagttgagtgtatgttctcacagtaaagtatgtaaagtgtgttagaagatggtaagtgctgtggaaaagaaacaaatagagcaaaacaagggaatcacctccgggagggtggcaaggttgagttgcaaattaaaattagcgcattctggtttgggatttggttggaaacatgacagataaagcagtggattgaatgataggccttgggttccagtcactgcctggtggttttaggggtctgtaagcttgaactttattttacaaaagcttttatttagagtgtacaccctgaactcaagtcctgattgtggggtatttaacagtgatgaaagagccaggctgttcttagccttttaccttagcaagacaaacagtatccaactggttctcattagcatgaaggaggaaacttggagaagccatgcacgttgacaacaatttttttttttttttttgagacggagtctcactcagttgcctaggctggagtgcagtggtgcgatcttggctcactccaacctccgcctcccaggttcaagtgattctcctgcctcagactcctgagtagctgggattacaggcgcccaccaccacacctggctaatttatgtatttttagtagagacggggtttcaccatgttggccaggctggtctcaaattcctaaccttgagtgatccgcccgcctcagcctcccaaagtgctgggattacaggtgtgagccactgtgcccggctaacaacaaatatttaaaggcaggaaagtggcagtgctctttggctccagtgagcagtcatggctcaataaatagaaatttcaggagagccaatttccattgattataaagacttaggtttgtagcaactagagctgccctctgggaaaagggtgattttatcatcaacgactgctcaaactgggtttggagaacaacccagtatggcttttacagagcagagttgtgccttaaggggaagatgcatggtttctaaacccctttaaactctgagattgcatgggggaaggcagctgcagatcatgctgcctgaaaagagaggatctgatttcaggccccagaaatcatgattttcctagttcttagtttccgcatctctaatgtgagttttttctaaggtttctagtctgagcttcgagactgagtttctgctcatgcttactcaccactgagtgtgaggcttttaatgacctgggccagtgactggctgcagcctagggtagccccaaacccacgccttctccaattaagggactcttccggacagagctcagagcaaagggtagtagcaggctttgagctgcagggagatactgtcatatcctagactgaaggaagttaagctgagcagaaaaatgctctgaagaatgactcagaagaggctcttgtgaggaagcttccttggagtacgcgtgtttggatttggggaggtgaaggtcgtccccatgccaggctggccggggctgtttgtgacatcgtggagctgagtgttcagagcatgggcttcagggcaggtagtcgtgggttcgaattttggttctgcagctcagtagctgtgtgaccttagccagttattccacttctctgagcctcggtgtctccattgttagtgatggagatggatttagtttggaaccttgccacctcccagggtggttgtgagggtccagtgaggtcacatgtgagaacaccagactaagatgttagtgtcagttccaatattcagggccgtggggcagggggaagggcgatgaggagacacagaagtgtgtgggcagcagagactgtggaagtgtggaggcatggggaggcctgagggctctgcttcgagagtcagaggatggtggcctccgagtgaggactgggttaagggaaggggtgggtgtgtctgggacttagggagaatgctgttgtgtggaggtagagtaaagacagcaggagggagagaaagggtgtgcgagggccagaggggactgtggagggggtgggcacacaccctgtgcggggctgggggtgtgagatggctaatgtggttggggtcagcgtgggcagggctgtgggcatcgttgtgtgggtgggaggcccagaagtgtcgccctccccatcctgagggactggttcctcgctgggaggaggaggatgtagccagaacctctgggaaaacaatgagtaacaggcaccagaggcagccaggtccagatgtgctgcctacctaggaccacaggctgtgctggctggtccctcccctgcccttcctcaggccttgcccctccactttgcccctgtgggtggagtggcactttcccccaccctggaggcccagggaaggaaagctgcctttatgagcctgaagcatcttggaggtctcctggggccagcaatggtgggctctttgccaaaagtctcaggccttcctccccccatcctgtgctctcctgccccaagagaggaggctctggtgggccgggagggcggggcacacgctgcaccttgctgacttgttgtacagtaggtcctactctgcgtggctgcacctggaagcacgttctttcagctgcacaggtgtctttcccttttggcctttatgaaatgcctgctgtgcacactccatatatttgcacagaggcacaggtgggacggaaagagtggggaaagcagacacaacctgctcgcttcctgctgtgttgcttcctgtctgggaccttccattcctcctctgtgagatgagaaacagccgcccttgccctagagagtgggtgaacaaagccctgggtaccaggtctggaggctcagtgggtgctgggtcctggatcctgcgatggggctgcctgttccagaaaacccgctccctgctcccacctcaaaggtgagaaagggaatctatttttttaaaaagtcaaacttaagaaaaattacaagaatacaatgaactcccacatacccctcacctagattcacgaattagtaacatttgccttatttactctaactctaatctctatagttattgtcataattattgctgattcaggtaggagtaagctgcagacatcacagtccttttcccctaaatatcccagcgggaattaactaagaataaggatattatcatacataaccaaagcgtgagttccacctttagaaactttttttttttttttttttttgagatagggtcttgctcttgtcacccaggctggagtgcagtggcgccatctcagctcactgcaacctccgcctcccaggttcaagtgattcttctacctcagcctcccgagtagctgggactacaggtgcccacaaccatgcccggctaatttttgtatttttagtagagacggggtttcaccacgttggccaggtttgtctcaaactgctgacctctggtgatccgccagcctcaacctcccaaagtgctgggattacaggcgtgagccatcactcccggcctagaaactttcacattgatggaatcatgtatttgtttcccagacctgccataacaaagtaccacagactgggtggcttaaacgacagagatttattttctcacagttctggaggctagacgtctcagatcaaggtgccgacaggtttggttcttctgaaggccctttccttggcctgcagatggccatcttctcactgtgtcctggcttggtctttcctctgtgtgagtccggattttctcatctcataaagataccagtaagattagattagggcctgccctaaagatcttattttaacttaattacctctttaaagacattatcttcaaatatgattacattctcaggtcctggtggttagaacttcagcatatgaatgggggagagagaacaattcagtccataacaaatactatgatctaacaggcagtccacactcaggcatgctggttgtcctggggatgttctttgtggcatccccccacattgacccacaatccagctttgttatgtctcctcagtgtcttgcctggaacagtttctcagccttggtggagaaagggaaccttcacgttgcagggaagcaaaggtgctcagcaggaatgggggttcagaagcgcaggctgccccaggacagggaagctgttgaagggtttgctctagtccatgaagttgcctttcctggctttttctttgatgtcaaaagcaccaggaggtgagcttagatctcaggaagcgcaccaagaatccgtgcatgagtcccctgcggtgtgtctgactccatcaccatggcgcctgttcgttgctgggctggttggcctgcagagccctgagtggtctcatggagggtgcccttctgagtgaccttgagcatgtgacttctattcctaccaatttcagtgtcctaatgtatagaacagccagtgacacaaattatagtagtaaacattttttgagcattcttgtcatgcaaatcaataaaaaatctgagccacccagaaagtccatgaggccctaagtcattcaacttagcgtttactgtgcattggctcacttcatcttctcagtaaccctaggtgctgtcattgtccccattttatgaatgtggagactgagcgatttatctaaagtcacagacttgcaaggggcagagtgaggtactgaacccagggctacttgtccctgtaatttccttccatagtgaccgttacctcccgggataatgtatgtgcagcagctaaccctcagtgagtgtaggaaacagaggtgctggtggtgattatcacctccctagtgtctgcttgcaagtaccctgaggttgaagtatgggactctgtacactacaagagcagggcctatgcctggctgtttcccagcaccccaagtcactgttcctaaggaggtacatggtcagtgttggttgggtaccaaaaggaagcaaaatgataactttcagacagctgagatatgcaccctcttgtcgacccccatgcttccgatattttaggtcctgtgtgtggaagtttttttttttttttttagacggagtcttactctgttgcccaggctggagtgcaatggcgtgatctcggctcactgcaacctctgcctcctgggttcaagcgattctcctgcctcagcctcctgagtagctgggcttacaggcatgtgccaccacacctggctaattttttgtatttttagtagagatgggatttcaccatgttggtcaggctggtttcgaactcctgaccttgtgatccaccctccttagcctcccaaagtgctgggattacagctgtgagccaccgcacctggccctttgtgtggaatattaagcacccagtgttttctgtactaccgccctttttccttcatagaaatgatttttaaccattaatttttaaaatgttagtaaaccttaaactttttatgttgcacatactcatatactgctgataggcagataaatgtatatactgtttctaaagggaagcttatcaatatctatgtagagccttcaaagcacacattttgaccaataatttttttttttttttttggtcaaagatgtaggccgggcatggtggcgtacacctgtactcccagcactttgggaggccgcagtggacagatcacttgaggtcaggagttcgagaccaccctggccaacgtggtgaaacctcgtctctactaaaaatacaaaaattatgtgggtgtgatggtggattcctgtaatcccagctactctagaggctgaggcaagagaaacgcttgaacccaggaggcggaggttgcagtgagcagagatcacgccactgcagtccagcctaggcaacagactaagactctgtctcaaccacgacaacaacaaaaagacagtctggtcgcagtgactcacgcctgtaatcccagcacttgagaagctgaggcaggcggatcacctgagatcaggagttcaagaccagcctgaccaatgtggtgaaacctcatctctactaaaaatccaaaaagattagctgggcgtggtggtgtgtgcttgtaatcccagctacttgggaggctgaggcagcagaattgcttgaacccaggaggtggaggttgcagtgagccgagatcacaccactgcactccagcctgggtaacaagagtgaaaactccatctcaaaaaaacaaaacaaaacaaaacaaaaagatttagtcaaagtttcacattcctggtggctcacacctgtagttccagtactttgggagtccaaggcaggcagattgcttgaacccaggagttccagaccaatctgggcatcatggcaaaactctgtctctataaaagaaaaattaaaaagtagccaggcttggtagtgcatgcctgtagtcctagctacttggggggctgaggtaggaggatcacctgagcccagggaggtagaggctgcagtgaaccatgatcacaccattgcactccagcctgggtgacagattgagacttgtctttaagcaaaacaaaagattcatattccaaaatgtttctcagtgccttctttataatggcaaaacacacatacacaaaatacaaaaataccacgtcctatgatggataaataattcagtaaggggttgtatagcttaaattatatgtggtataatattattcacctattagaaatgaagctgaaaagaaatttagtgacattagaaatatataaaccaaaaaaagctgtatacaaatttattggttatattgcagtttatttttaaaatttatatatctggttgggcatggtggctcacgcctgtaatcccagcactttgggaggcccaggcagatggattggttgagctctggagtttgagaccagcttgggcaacatgacgaaaccccatatctacaaaaaatacaaaaattagccaggcgtgggagtgtgtgcctgtaatcccagctactcgggaggctgaggtggtaggatggcttgaacctgaagtggagagtgtgttcagtcgagatcgcaccactgcactccagcctgggtgacagagcgcgactctgtctcaaaaaaaaaaaaaaaaaaaaaaaaattatatattcgtacatgtaaataagacttaccaaaaccaaaaaggtaaccatattttttttcctgtacagcaggattacaggtgatttttatttcattttatgtctgtgtctgtttccagcttctatgaaggtatatatcaaatttatgaaaaccagacaaaaatgcctttaaaattttcaggacaagtaggagaagatgaaaaatttgaatacaacatggaggtaaatgaggcaaaaatgaatattgagagggccggtcatggtggctcatgtgtgtaatcccagcactttgggaggtggaggtgggcagatcacttaagcccaggagttcaagaccagcttgggcaacacggcaaaaccctgtctctaccaaaaatacaaaaattagccagtctcataacctggtctctaaataaataaatagataaaaatacaaaaaacacatgttgagggcacttcttggcccctgtgagtcacctggagaagtgtgcttaggagccatccaggtagcagctttggggacttctgggaccactcagatgctcccaccccttctctgaaaaccaccctgtgtaggctcagggcagtgcctggcacaggggcctggagagctccagggaacagaggctctgtcccctatggtgccctcaggagtttggggaagagcaacatacctaggaagccagatgcacactcttcttattttcttattttggaaacttgaaaaaccattaacagtaaccgatttaggtattttttttggtttgtttttgtttttaggagcagaggtttaacaggcaaaagaaaaagaaagaaaggaaaacagctctctctctagtgagagaggggacttctgagaggaaaagcattttttgttgttttttgattttggttttgttttagagatgggttcttgctctgttgcccaggctgtagtgcagtggcacaatcctagttcactgcagccttgagcttaagggatcctccctcctcagcttcccaaaagcactaggattacaggcgtgagccactgtgactgaccttattagattattagattagaatgattataacacagtcattcaggaagcaagtataggaagaaaaaaaaggcaacacaagttcattgtagaaaatgcagaaaagcaaaaaggaaataaaaatcacttgactctatcctccagaaaagatgatagcatcctttctctaggcctaaaacacattatttcaccaaaataagagtttactgtaataataggttttttttgttttgttttgtgttttgttttttttgagacagagtctcgctctgtcgcccaggctggagcgcagtggtgcgatctcggctcactgcaagctcagcctcctgggttcatgcctttctcctgcctcagcctcccgagtagctgggactacaggcgtccgccaccacacccagccaatttttttgtattttcttttagtagagacggggtctcaccatgttagccaggatgatcttgatctcctgacctcatggtcctcccgcctcggcctcccaaagtgctggggttacagtcgtgagccactgcgcccagccatatatatatatatatatattttttttttttttttttttttttttgagatagggtcttaccctgttgtctaggctggaatgcagtggtgccatcatagctcactgcagcctcatacttctgggctccagccatcctcccatcacagcttcccgagtagctgggactacaggtgcgtgcaccaccatgcccacctaatttttaaattttttgtagagatggggtttcaccatgttgcccaggctgatctcaaactcctgggctcaagcagtcctcctgcctcggcctccaagagtgctggaattacaggcatgagccgcccaacatggcctaatagtgttttataactttgtattttggggccattcagcaaatattttctgagaagttactgtcttttttttttttttttttaagatggagttttgctcttgtcacccaggccggagtgcagtggcacgatcttcttggctcattgcaacctctgcctcccaggttcaagcgattctcctgcctcagcctccctactagctgggaatacaggctcccgccaccacgcccggctaatttttgtatttttagtagaaacgaggtttcaccatgttgcccaggctggtctcaaactcctgacctcaagtgatccgcctgcctcagcctcccaaagtgttgggattacaggcatgaaccaccatacccagcctgacttgttttactgagtaggtgtctttagggttcatgttgtagcgtgtgtcaaaatttccctttttaggctgaatcatatttcattgtatgggtatatcatgttttgtctattgatgggcacttggtttgcattgtcttttggctgttgcacataatgcagctatgaacataggtgcacaaatatttctttgagttgccgtttttagtgcatttgggtgtatacccagatgtggattgctcaatagtgtggtactattttacagttcttgaggaactgccatactgcattctgcagcagctgcaccatttcacattcccaccaacagtgcacagggctccaatttatccacaccctcgccaacagccaacacttttttttttttttttttttttagatggagtcttgctctgtcgcccaggctggagtgcagtggtgcgatctcagctcactgcagcctccgcctcccaggttcaagtgattcttccacctcaacctcctgagtagctggaattacaggcgcttcccaccacactcagctaaattttgtatttttagttgagacagggtttcaccatgttggccaggctggtctccaactcctgatctcatgatccgcccgcctcagcctcccaaagtgctgggattacaggtgtgagccactgtgcctggcctcattctgatttaaaatgcttttaatcaactttattgaggtataatttacatataataaaatgcacgcactttaaagatacagtgcacacgatttgacaggtgtatacacttgattaaaccccacaccagacaagatctagaacattccaacaccacagaaagttccttcttgtctgcaacataactctcccctttgccccaggcaatcactgatccagtttctatcatcatcagttttgtctgtcttggaattttatataaatagaatcatatggtatatatgtttttgtatctgatttttttttttttttttgctcagtttaatgtttctctaaatccgactcatgatttagagcaagactctgcaccacacagatctgatcagggccacacctgttacaaactagccaggtgggccgagcacggtggctcacgcctgtaatcccagcacttgggaggctgaggcaggcggatcacctgaggtcaggagtttgagaccagcctgaccaacatggagaaactccatctctactaaaaatataaaattagctgggcatggtggcgcatgcctggaatcccagctactcaaggggctgaggcaagagaattgcttgaacccgggaggcggaggttgcggtgagctgagatcgcaccattgcactccagcctaggcaacaagagcgaaactccatctcaagcaaaacaaaacaaaaaaaactagccaggtgattgacctctgccaagttcctgagttacttaagttccaattctgtgtcttcatctgtaaaatgggagtagtgagaatacattgagggctgttagccacagggctgatttttctctctgaagttgcaagaatgtaagtccaattgcacttgcaaatcaagagtgagtctgttaaattagccgggcatggtggcacacagctgtaatcccagcaactcaggaggctgaggcaggagaatttcatgaacccgggaggcagaagttgcagtgagccaagatcatgccactgtactccagcctgagcggcagagtgagactatctcaaaaaaaaaaaaaagaatgggccaagttataacctgcccactccctccccagccacccgactggagagatgatcacttaccaaagatgctagcaaaacccacaccactgcagcttaaaatagtgtaagactagtgccgactcagggcacatggcctcagcagaaacaatgaagaaaactaaaaaacctggcttcaagtgaggaggtttggaatttggaatcttgaagctgtcattgtcatgtgactattttaaatggtagcttctaactgcctctccctctttgagctgtccacatctgggaaactgtgacctgccagtgaagtgtgggtagtggcaatgtgtggatgagcccggttgtgcctgcagcctgggcctgctgaacacttgagggtcgggggttctcaggaaatccctgagagctcaaaggatggcctgaggggcctggtggcatgtgtggaaggggccaggccttcctgtccagagggttgatggactgtggtagcctgatgggacaataggagaggccctgtagacccctccagcagacctgtgcaggtttcctcctggggagcaccaaggtaatgcctcagcagtgactagtgaaggccagcactccctaggaggggctgcccctgcgtgccagctctgcctgagccttggccagctggcccaggagtgatgtggtggtattgctctctggctgcacagggagtagtctagcctgtggacatccccaatatcctgaaattagttcctcccaggaggaatgctgggccctttttagcttctagttggtgctaagagtgattttaaaataacggaactgtctgggcacagtggctcacgcctataatctcagcactttggaaggcctgaggtgggaggactacttgagcccaggagttcaagaccagcctggacaacaaaacaagaccctgtctctacaagaaattttaaataaattaggtgggtgtggtggtgcacacctatagtcccagctacttgggaagttgaggtgggaggattgcttgagcctagaaggtcaaggctgcagtgagctgtgatcatgccactgcaactccagcctgggcaagcgagcaagaggctgtcttaaaagtaataataacagaactgtgtgaaatgctctggttcatcccccaggctccttgccagaggcctccactcactccagacccctatagcccgtcgctgtcagctgtcaacaaaggatgcgaatgctggccgcttcctgtgggcttcgtgtcacccagaggtaagcccatggcctcctctcgggtcccttcaacacggactgaggaggacacatggatttttctctttagatgaaagaatggaattgtgattatggggtttttttttttaagtctttatctcttagaaaaatacagatggaatgtgatcgcctgtgtgtctgggacttgctacaaaagcaagaggaagcaggaggttgagatgaagcaagattggccatgagttgttaattgatgagtctaggtacatggaaacatggaagtgcgttatatagtttggtctactttgttttttccttttttttctttatgctcatctttaatgtgacggtaagttctgcctgcttttcacatttacattttctataagttagaaagcaactgagcgggcccttaggatctgacccacttgaggttcagctctagcgccaacattcctatgagaccttagacaagaaggagcctctgttccttagtctgtgaaatggggctgatcacagctgcctcaacgattgctggaagagtttttcataaacgaatgcacaaaaagcacttggtttggtatctgacacctcatgagttttagtaactcacgttctgaatgagaatctggccagttgaccctggctgaccatttgggacagggaggggcacgtaaggaggagtctgggggtccacctctcagatcaggtgggcacacatgcagcttctgcctttgttttttgttttttgtgtgtgtgtgtgtgttttgggatggagttgcgctcttgttgcctaggctgcggttcaatggcacgatgttggcttgccacaacttccgcctcctgggttcaagcgattctcctgcctcagcctcctgagtagctgggattataggcttgtgcatcatgcccggctaattttgtatttttagtagagacgggatttctccatgttggtcaggctggtcttgatctcctgacctcaggtgatctgcccgcctcggcctcccaaagtgctaggattacaggcatgagccaccgcacccagtcttttgttttgtttttaagactcatgcagtcacagaggcttctgcctttggttaaagcagtcttggctccagttacatctttggttggtttggaccttatttggcaacagtttgaagctataatcagcagtcagattcctggatttgattctgctaaaataccgtaggtgaagcatttatttagttactcatttttaaatgttttcttttgaaataattatagattcacaggcagttgcaaaaaatgtaccctaaggtcctttgtaccttcacccagtttcccctaatggtaagaataacacatactttttttttttttttttttgagatgaggtcttgctctgtcacccaggctggagtgcagtggcatggtcacggctcactgcagccttgaactcctgggctcacatgatctcctacctcagcctcttgagtagctgggactacaggcatgcaccagcatcccagctaataatacatcttagtatgtctgtagtacaatcagtaaactgacattggcataatccatggagcttattcagatttcactagttctgtaggcactcatgtgtgttcagttatttgcacttttaacacacgtgtagatccatgtaaccaccccacactcaagatacagagctgttcatcttcaccaaggtgctcccttgagggaagcatttattttctaagacagatatctttttatacccctgatttaaaagggaaagaaacgcaggagaatgttgggaaagatgtttgctacttgttatcagtgatttattttactttgtgctttcttgtttgagttttgtttttataatgaacgtgtatcagttagacagaagcaacagagctttttttttttccatctcttgaaacccatcacccagctgcaccactgctgatgttttggcaaacacagactgctttctaggttgttctcctgcctttctctctgactttctccctgctctcagaagacgttctctggaggcagtgctgcatggcctgctcccatggtggtctggtgttcaaacctcactccgcagggggctcccacaagacgtgggataagtggtctgccagcacttggcctccagaggctcttgagaagacctatgtcaacatctgctgcttgcctttttgaaacccagcctttctacactgccgccttctctgcctgtatccttggacggacatggatttggcctcctctaacaaaacatctgtggttttagattgtctggtgtgcagctccctgcatgcatgcaggactcccatgtcttccctaccaataattctgatcactacacctgtcacctgccatgggctttccctacatcagggactacaccaggcatttgacagacattgtctccgtgacctaggagcgacccactggggcaactgttatcttcttagacaaggaaagtgatgctcagagaggttaagcaacttccctgcgttaccagctggtttgtggcagaccaggactcaaggccaaagtcatgtacttaaccactcacctccccacctcctgccaacactggctgccattaacccgggattgcttgtgtcttctcataggtgagcccaggccaggatgggggactccagggacctttgccctcaccttgactccataggagaggtgaccaaagaggacttgctgctcaaatctaaggtaaagggtcagaccttacggggccagggcccacacccagggctgcctctttcctggggtgtggacatttctgaagcagtggaaaaactggttccctgacagtctctgctcagctttctgtgtaaatggaaatgctggcatctgcttgggaggccgccttccggaggctctgtcctaatagccattaattatagtttagacaaggccatttgggaaccactaatgctctctgtccattagctgttggggcggtgcacagagcctctccaaggcagggaatgaatgctgctttccaagttcaggagcgtttttacacaggtggctccaggagggctcagggaagcctgagcaggaagctgggcctcttctcagagtaggaggatgtgttgccatccttttggtgttgtgaaatgaaaatttttgaaaaggtaatacttgaacagggttacaaatgaaacaggacaaaaagataaatgtcaagaagtccttctctcacccctgtgcccaccctccccagcccacccccgggtaagcacttattctcttttgtatcttttcagtttctttatgtgaatacaagcagataaactcattttaagttttgccctttcttacataaaagatggtatacgatcctctctgttttgtaacttgctttattcacatgacagtgtatcttggagctctttggacatcagtgcatagagacagctttcacatttgttaccttgaagctgcatcatatttcatcatgtggccacagtgactgatgctctctgggtggacacctggaccctttgcagcctcttgccgatacacatgatgctgcgatgaatggccttgtagaaaagtcattgcatccatgggcagagctgcatgcaggcatgttcccaggagtgggattcctgggcatattggcacctaatgctggtcgcctggcctcgctgcaccagcaggtccttggtggcctttggcctgagctggttttgtcatggggcctggcatgggagcagttcttcatagtgcctatagctgcttttgaagtgactttgcctcttgcagcatgaagtggggcagagtgaggcccggatgtgtttgcactgtctggtgctgggtttctctccacttcttagggaatctgagagcaggggggggatgaagcaggtggcagaagagaggtggagcacaggaaggtttgcactgggcctggcagccgttcagaagcctgttagtgcctctagatcagagactgggcttgtctggggtgctctggggctgtgtgtcagagatcacaacttcagctcctctttgggtatccagaaagttacaaaataaaaccaacaccgttctaaaatactcagaaagagcaaggatatgagcaggtccttcccagtaaaagaggtagaaatgacaagaaactttctgaaaaagatggctgacttcactctcattcttatggatattgctaatgaaataggatgataccattttgcagatgggcggaaagagactgatcccattcatagctgacagttatggagaaaatgggccactcacgttgtggtagggctaggaattaccgtaacttttagggaaacaattctgcttctgggaatttatccagtagaaatgtaatcaccagttataaacatatgatacagcagtatttattgagcgttatttataaaagggaaaaactggtggcacctgaatattcctcaagaaaggaatgggggaatcaattatggtgtgtccagagtgtgcagttatcacagaggaatgaagtcttcatgtacagacttgggtgaccctcaaaggcacattacagagaaatatgtattgcatgatcttatttttactaaaaatcaccccctcaagatccaggcatacgtgttttatgtaagaagaatgtacggagggaaatatttcatatcatacacagcatatagatgtcatctgaattgttatagcaagcattcgatacttttataaatcaaataactgaaatggaaaaaaaactgggaagaggagggtgaattgtgaagtcaaaaaatcatgagagagatgacaaattcaggaaggtttggggctgcggttttgagtctgctaagcagactgatctcctggcacccacagcatcctccgtgagagaccctaaaccacagagtgcagatctcagcttcatcgtatgggacaagctgcttcacttcaaccccatgttcaggctttttacaaacacagctggaatctgggtgtagtgacaatgagaaggaggccatggaggcctgggagccaacatggccaccctgggggaagccaggctttcttggtgagaggtttgtgaccttgctgcactggggtccaggctcactggcttcacctgctgaccttgctctgtgacaagggtgtgacctctctgagtcccagtttctcatcagtgaaagggggatgttgctgggccctgctacagagactggaggggattatgtgagcagtgtgtaaagaactcagtgggctgggcacggtggctcacgcctgtaatcccagcactttgggaggccaaggcgggtggatcatgaggtcaggagatcgaggccatcctggctaacatggtgaaatcccatctctactaataatacaaaaaattagccgggcgaggtggtgggtgcctgtagtcccagctacttgggaggctaaggcaggagaatggcgtgaaccccggaggcggagtttgcagtgagccgagattgcaccactgcactccagcctgggtgacagagcgagactccatctcaaaacaaaaaaaaaaaagaagtttcttttctctcacagaacagaccacaggtaggtaggactggtagggtagctctgccattctcaacatgtggctttcatcctgagtccaaggtggttgcttcagctcctgccatcacatccacattccagccaatggtaggaggagaaagagcaagggtagcacacagcacagaagtggcacacatcgtttttgctagtttgactagaactgagccacatgatcatggtggaagctggaaaacgtcatctgcagcaggctagctgtgtgttcagctaaaatccatgcatcccattgttaaagcaaggaggagagaaaggattccagtagacacggagcaggctttgacgcccagaccgccagaaacctgggcgtttcctggggtttgccaggtctagtgaactcttcatttataccaggccctgtgaactcacaggggtaggcagaacagaccatccctctttcatggcgcccttgtctaatggggagaaaggctgaaataattcagtgcaagaaaggaagagtaaggggtgggaagagagcgtgttaacgagtctcttacatgattttattttccaagattaggttatagacactaaaatcataaaatgttgatttgaaaatgtttttacaggcacaggatagaattcaaacagtaaagtataaagtgctcccctgggagcctaatttggacaggaagtctggcgaaggcctttctggggccagggcttgaagctgagaccttctgagtgcatgtcagccaggtggggccctccaggcaggagcagtctcagtgctcagccccgcaacgggctcctcatgcctgctctttttctctcctctcaactcacacagggaacctgtcagtcgtgtggggtcaccggaccaaacctatgggcctgtctgcaggtaaaagacccttgtggccatcaggggtgtagagctgcttccacctgttatcagcactgcacaggctggtgcagtgggctagactctgggctgggaacttccatccctagtgggcactgccagaaaccttgggctggggcacaggggcacaggactccaaagtcagcgaatcctgggctggccattctggcagcaattaaaaatgacaggagaaaaaaataggtcggagaaggctctagactgaaggctcccttcttcataggacagtattctagcttggcatgaatatgtgtgagtcaacgtgggtgtcttggctttgaggcctggcactgctgctcagcagcgtctctacctgggccagtctcattttttccctgaaccttcattacccatctataagaaaggggctgcaacactgacagctgacaaccgtccccgcctcatggggttagggtagaactggacaagacggatgcctgtgactggccaggagacagtgtccgggagaagctggaagggtttgggtgattactggttactaaaaagagtaaaagtagatgtatgaaaacatgacagtttcctctgagtggtagaattatgggtaattttctttttttctctgtagtatttaaaaaatgtttccaagtatgtatttttatagtcatactaaaaatgactgttacttaaaatttctttaaaaaaaaaaacccacgagtaaaaacaacaaagacagcagcagcgagtgaagacagccagtcagtctttgcagaagtgcaggggcctccagtgggattctggcctcttctgctcagccctgtcactcagcacaaagtagatggcaagacactgcgtatccagggggcagcaagaagggctagatgttatctcctgggctgttacaagtgcaggacgtggtcctacctcataggagccacagtcccctcagacagatgtaggagcctgatgcagaaaatggcacgtgctttctgagtcagccacatgatatgattccattgttttcccagaaggccctgctgatcacaggtggcagtgacagcaggcgctcctgtaggagtatggcattggctactggctggcgtggaggctcacagtggaagcactgagcgggccttggaggatgggtagatttgggataggagagtgcgagggcaaaggcagtgtcatcaggggcatgtgggccctgctctggggcactgggtcagtactgggttcccactacctgtgacccttgtttcaaacacctggtccccattcatcatcccccattagaaaatggctgtgaggcctaggatccccaccaaaaacacaggtcccaataactgaccccacttcacatggggtttttgtggagggagagggtcttggtcccgagcagccaggccccagctgggaccccgcctgggcttcttgctggagagcagcagcccagggcatactgctcgtctcactcagagggcagggacgctgtttactgtccatcactgcccagcagaacttcaggtgtacagacctacagacccgtgttcctttgagatggcagagcctcagtcccttgtggcccctattcaggagaggtaggggcactgactttgggatggaaccagagacactgtgttgacaccatccttttggcaagctccagtccactctccttccctctcttcccaggttgcctgcccctatgttggctgcggagaatcctttgctgaccacagcaccattcatgcacaggtgagtgtggtggctgagagtatgggccctgcagttagatggcctggggttcaaaccccagctccaccttcccactctgggcctaaatggctggggcaataaatggtgtcatcctagcatagcttctgcaaagaagcaagagagaatgcaggtaaaaacattttgcatctgcaccatttgataagcagcagccctcagggtcctgactgggggtgggtaagcaaaatttgagcttccggcctctgtcctgacagggcctcttactgagaggctggggagcggagcagccattacaggttggggcacttgttaggctagagtgccctggaccttgttttggatatcaccctctaggcaaaaaagcacaacttgaccgtgaacctgaccacgttccgactgtggtgttacgcctgtgagaaggaggtattcctggagcagcggctggcagcccctctgctgggctcctcttccaagttctctgaacaggtaacctgtgtggtgggctctgtttggttgttggtgacactgtgttgaggatgaggcagtgtgacctgagcatccgtggagcatggggcagtaggtcccagaggtgtctgtttctgggtcagtatgttttcaggtgactttgaggagctcacatcagcacatgctcactgagcccaactctgtgccgaggcatgtgtgagaccatgagggtgcagaggtgactgagagtagggcctcccttgaggagctcggagaccatggggtggccgtgtggagtgcaggggttggggtgggcccagggccatgaggtgagtgtagacccttccaggccttatggagagggttgacaaggtcacagatggccctctggccatcccagatctgaaaccattcctaagggaattccaggtagttgctacagcacacttctctatgggaaatgcccagaaaccacctgggtaacgtcaaccagagaatggtcctttgatcaacagtgtgctgtgcaaccttagagatggcaggtcagcaagcctgtgacctggagggcccggccccaggtgtgtcctcagggaatggtcagtaatcctggatggcagagctgcctgctagaggagaagccaggacatgtgtgcagcatctgcatggctctctcctccatttattttattttattttattttattttaattttttgagaccgagtctcgctctgttgctcaggctggaatgcagtggtgcaatctcatctcactacaacctctgcctcctgggttcaactgattgtcctgcctcaacctcctgagtagctgggattacaggcgcccacgaccatgcctggctaattttcatatttttagtagagtcagggttttgccatgttgactaggctggtcttgaactcctgacctcaagtgatccgcctgccttggcctcccaaagtgctgggattacaggcaggagccaccgcacctggcctctccttctgtttagacagtcacatgatagggctcaatattgctcaaaatgcttattgaatgcatttgtgaacttggtagatatttatgaatttttatagaaaaggctataaaacagtatatgcaatatcttgtttttgttgtgcatgtgtattaacagttaaaagtctgtataatacaggctgggcgccatggctaatgcctgtaatcccagccctttgctgggccaaggcaggaggatcgcttgagcccaggagtttgagaccagcctgggcaacagcgtgagaccctgtctctacaaaaaataaaattagctaggcatggtggcgcatgcttgtaatcccagctacttgggaggctgaggtgggaggatcacttgagcccgggagttcaaggttgcagtgagctatagttgtgctactgcactccagcctgggcgacgagcaagactctatctcttaaaaaaagtccacatagcccaggcgcggtggctcattcctgtaatcccagcactttgggaggccgaggcgggcagatcacgaggtcaggagatcgagaccatcctggctaacacggtgaaaccccgtctctactaaaaatacaaaaaattagtcaggcatagtagcgggcacctgtagtcccagctagtcaggaggctgaggcaggagaatggcatgaacctgggaggcggagcttgcagtgagccaagattgcaccattgcactccagcctgggcaacagagcgagactctgtctcaaaaagaaaaaaaaaaacgtctacataagatacatacagactattaacagcagttctctcaggaaaatggggttgcatgtttatgtttctatttttctccaaatttattataaataaaatattttttttattgccaataaaaaaatgcaagtcaacatctggacacagtggctcatgttatcctaacactttgggaggatcactggagcccagtagtttgagaccagcctgggcaatataaaaaggttagctgggtgctgtgcatgcacctgtagtctcagctactgagaagggcgaggtgggaggatcccttgagcccagaagttggagtcagcagtgagctctgattgtgccactgcactccagcctgggtgacaaagcaagaccctgtctctaaaaaaacacagacacacacaaatcaaggagttcccagggcaaggccaccaatcctatctcttttcacagtaccttctgctcagctggactggctcagcccagtagggccttccgggcagtagggctggacttccagcccttgggagacacctgggcctctgaccccagcccctctgttcactgttttcctcactttgggtctttaacacaggactccccgccaccctcccaccctctgaaagctgttcctattgctgtggctgatgaaggagagtctgagtcagaggacgatgacctgaaacctcgaggtaatggcccccacagcaggggaagctgatgggctgggctgggggccctcatctggaggctggaaaccgccagagtcttggtctctatttgcacctgctatatgggcaaggaaggatggggtgacggataagctgtttagcatggtggcttcaccccagaagttggctggcctagctaaggttctggagagctggctatcttgtcccctctcccagctgggtgaccctgggcaggccgacccctctgctgtatggtctggacagtgggcctggctgggcggaggggcaaaggagttcatctgtttaaaacactcaggtaaccgcagctgttgtgagcaggaaccacgttagtttactgggaagattcctggggtggaacgcttccaccatgtcctcttcttgggtcttgggcagttgagagccacacctttgtgccaaatgtgacttgcaaggtttcctcggtggggcagggtgctcacctgctcctccccgttgtgtttatttcccaggcctcacgggcatgaagaacctcgggaactcctgctacatgaacgctgccctgcaggccctgtccaattggtaggtcgacactttgtccgagggccgagagctgtccctggcaaagccccggaaacagcagcagtagcagcccccagccggttgcccacaaacacatgtataggatgcacagcaaaatgcctgaaagcatgtataccctttgacccagcaatcctcccagtcagaatgtatcctgaggagataaccggagatgctggggaagttgtacgtgcaaggaggctcagtgctctgttgtttactggaaatgatttaaaggcccatctgcaagagagtataaattctcatagcccttgcagcaagtgcaggaaaaatggcacaagacaacatgcattgaaacaagaaggggttcagaatctggtgagtgggggaaaaaggaggttataaagcattgcatggtacaatcccgttttatgggagaaatgcgattttccattaaggataaggctgtgagctccatgaggccaaggatgtctcctgtgtctgacgtgcttctcctacccagtggaggttagagatgcagtatatgtatgcgggaagcagagagggaatgggtacaaatgcgtagaaaagtctggaaggctatgtcccaaaatgttcctagtaactatcctcaggtggcaggatgcaggtcaattattgttaataattgaccacacccaggctgggcgcagtagcccacgcctgtaatcccagcactttggtaggccgaggcagatggatcaccaggtcaggagatagagaccattctggctaacatggtgaaaccctgtctctactaaaaatacaaaaaactagctggacgtggtggcacgcacctgtagtcccagctactggggaggctgaggcaggagaatcgcttgaacccgggaggcggaggttgcagtgagctgagatcatgccattgcattccagcctgggtgacagagcgagactccgtctcaaaaaaaaaaagaaaaattgaccgcacccaatccgttttaactttaataacctctttaaaggccctgtcttggctgggcaccgtggcttacgcctgtaatcccagcactttgggaggtcaaggcaagtggatcgcctgaggtcaggagttcaagaccagcctggccaactagtagagcctgtctctactaaaaatacaaaaaaattagccaggcattgtggcatgtgcctgtaatcccagctactcgggaggctaaggcaggagaagcacttgaacccgggaggcagaggttgcaatgaaccaagattgcaccactggactccagcctgggcaacagagggagactctgtttcaaaataataataataataataaaaaaataaggtaagatagataagatgagataaaataaaaatgccctgtctctgggagttagggcttcgcagatgaattttggaggatacaattttctcataactggtaggagccttctagtcaccttcaggagtttctgggtccagggccactgtgctccctgtgcgagcactcagggctccccgctatgcagccctttctaaactgccgcatgcctcatttgctctcctgacctggctctctctcccctgcacccagcccgccgctgactcagttcttcttggagtgtggcggcctggtgcgcacagataagaagccagccctgtgcaagagctaccagaagctggtctctgaggtctggcataagaaacggtgagcagctgcatccctagccttgggcggtgtgtggggactggggtttcctgtcagcacccatgattgagtacttcctgtggattcagcccccagcgaggacttgcctcactttgtcccgggtaatgcttgcagcaagcctgcggggtggaaattgcatccagtcctgttttacaaatagggaaactgaggtgcagagcactttaagtatcttgctcaaggtcatagaacctgcaaaaagtgagctagaatttgacctactgttgaccctaccgagcagccactggtagatgtctttgccaagagacatggtgacccggcctcagccaggactgtgtgtgtagaaggaggtgtggggcaggggagcacagactggatggagcttctggcacagtatgaaattaatttaaagatcagagtctgtgattagatctgtttctccaggaaaagtcaaagttgggaataattttaaatgagcacatagaaatatgtattatgtgtagaagcggatgaaaaaccagcgtagggccaggcgcagtggctcacgcctgtaatccctgcactttgagaggctgaggcaggtggatcacgaggtcaagagatcgagaccgttctggccaacatggtgaaaccccgtgtctaataaaaatacaaaaattagctgggtgtggtggcgtgtgcctgtagtcccagctactcgggaggctgaggcaggagaatcacttgaacctgggaggcggaggtggcagtgagccgagatcgcaccactgcactccagcctgttgacaaagcgagactctgtctcaaaaaaaaaaaaacaaaaacaaaacaaaccagcatgggagaaatatgtattaaatgtagaagcagattaaaaaccagcgtggggccagatgcagtcactgacacctgtaaatccagcactttgggaggccgaggcaggagaatcatttgagcctaggagtttgagaccggcctggacaacacagcaagaccccgcctctacaaaaactacaaaattagctgagtgtggtgtgagcacttgtggtcccagctactcaggaggctgaggtgggaggatcgcttgagtccaggaagttgaggcaggctgcagtgagcttgatcatgccattgcacttcagcctgggcgacagagtgagaccctgtctcaaaaaaaaaaaaaaaaaaaaaaaagtctgtgtgcagtggctcactcctgtaatcccagtactttgggaggccgaggcgggtggatcgcaaggtcaggagttcgagaccagcctggccaatgtggtgaaaccccgtctctactaaaaatacaaaaattagctgggcatggtggcgcgcacctgtattcccagcactttgggaggctgagacaggagaatcacttgaactcgggaggcggaggttgcagcaagccaagatcatgccactgcactctagcctgggaaacagagcaagactctgtcccaaaaaaaaaaaaaaaaaaacccagcatggtacaatataattccgcttgtgtaagaagccaagtttaaatgtgtatctgtatgtatttttgtatatgcatctgtagtttcacagaaccagaaatctaatggtaagtatctggtgccattggtggtggtgtttttctcttgtacttttctgaaattttagatttgtcaataatgaacatgtcttacttttgaaatgagaaaaccacagtaagtgtttcagaatgaaaacaaatcatgtttaggcgagtttgttgtgcaccagaaggaaatgatgctattttatttgagctctttgcttaattgaggcagctatgacttgacattttcttcttgtctgtagagatgtgtgagcctcttggggctcctggctgagtaggcccctccccaaatgtcaggaaacgccacactctgatccagcctgacgggctggctgcctgcttctctcgggaatgagcagctcaaggcaggctacctggactaatgggtttgggcttcctacaggccaagctacgtggtccccaccagtctgtctcatgggatcaagttggtcaacccaatgttccgaggctatgcccagcaggtaagccatctgagctgcccaggggacacccaaggccatgacccaccaggcctgactttgacgccaaaaccagagtggaaaatcgcaatggcagctgagcactggttggcaggtctcacggaccaggctctcactcctaagcccttcacacgtgtgaggacagtggagcctcccagcaacctgctgacatttaaccccacttcacagatggacagactgaggttcaggggccgagccacttgcacaggccacacagctagtaaatggtggaggggaattcttttttttgtgggggagggtgggtacagggtctcactctgtcacccaggctggagtgcagtggtgcagtcatggcttactgcaccctcgacctcccgggctcaagcagtcgtcccacctcaggctccgaaagtgctgtgattataggcatgagccactgcacccggcggaggggagatttgaacccaggcaaccttgctgcagggcctccgcgttgcacccaaaatgacacagggtttcatttccccaaaccacaggcaaaatttcacttttattaaagtaaaaagtttgattaaaaattttttttaaatctagagaacccttttgaaaccaatcacatttttctattttataaaataatgagaccaagacagagtgcagccacgcgtacacctcagccccgggctgatggctcctgccctccagcctcctgccccagatggcccacagcctgggctttcatgccaggcctgcaggcagagctggacctggctgggtcacctcttgtgctgcctgaaatgagcaccatggacggagtggcagtcatgtggggacaacttccgccctctaccccctgcctgctgtcccgtcccaggatgaagtctgctgggcctttggctcctgcttgagaagctcagcactgcctggacacctctctttttggggagtgataacatgcacaatgactaaaattcactgagcaccatttaagtggtcacaacttagtcctcatagaagtctcacaaagtgggcactgttgtcacccacacgttacaggtaaagagctgaggctcagagaggttctacccctcacccaggtcacacagcacatcctggcagagatggcattcaggcctacctgagcccatccctcagcacagcaccaccctgactgtgtgcaaggcgccctgccggctttcagctctgggtcaggatgccgttacggagggccatgcgctgcggcaggactccatctgggctccggcagaagcatccctttctgtggttttaggatatcgtgtggggacacttctgaggctgaactgtagacgcagctgcgggcgcctcttaagggccaaaagactcttttgtgcttctgcatggattgagattttggcaaggaacacatagtacttttgttgaaaggaagaaccagaaagagaagtagatggcagattgaaagcctcttcttgaaagggcctttgatcgtgcctgccacaggacacgtgtcccctccctgatgcaatgtaacctcgtggttcattcctctgatcttggagcctgacactttgccttggggagtccctcctgagccctcccttccctgcacatgagtggagagagccgggatcctcttcccagatgtgtgacatgaggctggctctggctgctacgtgacccctgcctcctggggatcagagcctgggctgagggctgcttctaacaaccaggtcagggactgctggggctgatttgggctcggaacccaagtccttctccaatgcccagcaccacccgagcacccgctagctgctggggtctgctgccaccaccacgttctgacctcccagtgcaccccctgtgtgagcacacagatctcagtggggctcactgggcgcctctgcccgagcccctgctgccttggcttcctgctgtgctggtggcccagtcacagagtggtcaggataaaatggtcattgctgggatttgagacccaggcagcctgcaggggcagcttagactgagtcatgaccaggtctgtgggaaggtgagagcaggcagtgagggtatgtgggggctggcacagggactgagggagcagggggagccagaggaagggtagagcatgcaggcagtctggcctgtgggtagcgtggcttggggcaggactcgggtgagtcctcttttggcatcacactccctcatccttccgccacccccctgcccacctccactggtctcatctgtagggagaaaggtggctcgggcttaatgtggtactgcctctctgtccctcccgtgctgagcttgcagcagaggcaggagattcagagccggagccggggagttgcatggacccaggtgcatacctggctctgacactttctagctgtgtgtcctggtaggtgtcctttagcctctccagtcctcactgttatcctcagaagaatggggttaggacagactgccatgggaggccgctgtgggggtgagcaactcttctgcagggggcgcccatgaggtcctcctagatggaggctggcgctctcatcagccacagggcgctggagactggttcctcctgcctccaggggagccctgttgatgcagcccctggttctaggacacccaagagttccttcgctgcctgatggaccagctgcacgaggagctcaaggagccggtggtggccacggtggcgctgacggaggctcgggactcagattcgagtgacacggatgagaaacgggagggtgaccggagcccatcagaagatgagttcttgtcctgtgactcgagcagtgaccggggtgagggtgacgggcaggggcgtggcgggggcagctcgcaggccgagacggagctgctgatcccagatgaggcgggccgagccatctctgagaaggagcggatgaaggaccgcaagttctcctggggccagcagcgtacaaactcggagcaagtggacgaggacgctgatgtggacactgccatggctgcccttgacgaccagcccgcggaggcccagcccccgtcaccacggtcctccagcccctgccggacgccaggtatcagctggccggggactgcgggaggaacctcagcctatggcccagtacctaccgggtgctgagcgccgacctgcagtagcccccgggggacgggttcttcactagacccgaatgacagtggggaagtcagcctccgggggggctcagtgatgtgcccagggtcccctagctcataatgctggagcccaattcagagccctctcccagagccctgagccttccagccggacatggattggacaggtctgctccggcctgtgtgctggggccaggagtgggcacatgacagaggagacacattagggtcaggctttcgtccctttaggaggggctggcaggtcatcttcctgcccactcgtggagctggcctggctgccctggcccagcatggtaccctctctgcccccagagccggacaatgatgctcacctacgcagctcctctcgcccctgcagccccgtccaccaccacgagggccatgccaagctgtctagcagcccccctcgtgcaagccccgtgaggatggcaccgtcgtacgtgctcaagaaaggttcggggggcacgggagggtgggtcagcttgaggctgggagtacagattacgcccgtagctgcctttctcatggccccctgtggcggagggccgggctatgggctcctctcaggtacacccctgagacaccagtgtgggagccacgttttgcagaggatgacacagaggcatgagatggtgaattgcttacccagtcatgtgactcacggatgtcactccacatcctgtcaaaggaagccgcagggcccgcacctcgccccggccaggcaggtggaggctgggctagtcctgtgctgtgtccccagcccaggtattgagtgctggcagccggaggcggaaggagcagcgctaccgcagcgtcatctcagacatctttgacggctccattctcagccttgtgcagtgtctcacctgtgaccgggtgggtgccccagggatggggggagctgggccaggctgccagtggcctcagcagctcttgccctgactgggtgcagggtgggctctccacgggtgctccctgcttttatccaggggagggccctgcctgcgtggatcccgtgtctatggcctggggagtagtccctctgcccctcacctgctgcttggggtttggggtgcagacattgccagaggatgggcagcagactgaccttcaaccccacaggtatccaccacagtggaaacgttccaggacttatcactgcccattcctggaaaggaggacctggccaagctccattcagccatctaccagaatgtgccggccaagccaggcgcctgtggggacagctatgccgcccagggctggctggccttcattgtggagtacatccgacggtgcgcccaccttgccactactgggcgacatgggctgggcctgtcctggttttcctgggcgggagacagtacacagtgaagtccatgcatttggggaaccagggaggtcctgggaggagctgggggccgaagcctgcagaggagttggcttaatatgcaggggatttcttggctactttgaagtggccaggattggatagtcccttggagctggagggcgatggacagcagggaggtgaccacatggcaggttgaagggagggcagcagcaggacacaggcctggttggcgggaagggcagcagctttcccagggctgcctctcctgcctgaggccagagacccgcatgaccccagggagggggtagcatgatcatggccgcaacacagatgaaggaggccaggcttgcggagagatgatgtcactcggcccaggacacggacgtgtctggctccaggcctctgccccgacccgccgtgcccggctgcttctctgggccttcagggtccttctgcggctcaggcctgacagacctcagccagagtcccttcagctcctgttcttgcccaggccctggcagcacccctgcactccttttctgtctgtaggtttgtggtatcctgtacccccagctggttttgggggcctgtcgtcaccctggaagactgccttgctgccttctttgccgctgatgagttaaagggtgaggggcctggctggcaagggtcggggaggtggagggttgtggggacggggatgtgcagaccccagcaggccagcatgcagcccagggcttgtgggatgcacagccaggctagacttggcttccaaggttgatcccatcagatacccacgcccactgccagccacgctggaccagggccatgtgctatcccaaccccatcatcttgcagctcttgagtgttcacttatttttatttttaccaatttggtgggcaaaaatgatgtatgttaatttttcatttccttgattactgatgagtttctacattttttgttaaatatactggctctatgtatttatttaaacattgcccattcctgttcttgttctttttctccgttggctatttggcatctaaacctttgggaaaactctctcttttttttttatttccaattttcaattgcgataaaatacacaaaatgtaaaatttaccaccataaccattgtaaatgctgtttttaacagaaagtgcacagtcgagtagtgttaaatacatgcacatggtcacgcagccatcctccccattcatctccagaacttttacatcttgcaaacctgaaactcagtatccgtgaaacagctccctactcccacctcccagcccctggcaacctccacattcaagtctgtgaatgtgactactctaaaggcctcatagaagtggaattatacagtacttgccattttgtgactgacggcttttactgagcataacgtccttagggttcatccacgttgcagcgtgtgtgtcggaatgccctgccttttgtatgctggttatttattgttccattgtgtggatggctggggcctttctgcttattcgttcatccgtcagtggacactcaggccgcttccctgttagctattgtgaggaatgctgctctgaccatgggtgtgcacacctctcttctttcatccctttgggtctatgcctatttttaatttctcgaggagccaccgtactgggttccacagtggccaccccatttcacattcccaccagtgacgcacaagagttccagtttctccacatcgtcgtccacactcattttgtttacttttttgatgggagtcaacctcatgggtatgaggtggtatctcattgtgcgttttttttgttttgttttgttttgtttttgagacggagtctctctcttgacgcccaggctggagtgcaatggcatgatctcggcttattgcaacctccacctcctgggtttaagcgattctcctgcctcagcctcccgagtagctgggattacaggcacatgccaccacggctggctaatttttgtatttttagtagaatggggtttcaccatgttggccaggctggtcttgaactcctgacctcaggtgatccgcctgccttggtctcccaaagtgctgggattaccggcgtgagccaccgcacccagcctcgttgtggttttgatttgcatttcctaatgatagtgatgttaagtgtcttttcatatgcttgttggccatttgtaagtgtttggaaaaacatctatgtgagtcttttgcctattttgttttttgttgcttgttatagggattcttttttttcttgagacagagtctcactctgtcacccaggctggagtgcaatggcatgatcttggctcactgcagcctccgcctcctgggtgcaagcagtcctcccatctcagcctcccgagtagctgggattataggcacgtgccaccacacctggctaatttttgtattgttagtagagatggggttttgccatgttggccaggttggtctcgaactcctgacctcaaatggatttgctgccttggcctcccaaagtgctgggattacaggtgtgagccacggtgccggcctcgttagttagaggagttctttatgtgtccagatacgtgacttataaccctgtcctcccatcctgtagggtgcgtttcattctgtggtttgtgtcttttgctttggttgcctgcacctttggtgttgtgtttcagagatcatcgccagatccaatgtcatgaaacttttttcctacttttctcctaaaagttttatagttttaggtcttatattgagatctttgatcccattttgacttaattttcacagtgtgcatggagggggaaactatacattaagattttaagctggtcatggtggcatgtacctgtgaccccagctactccggaggctgagggtcctctgagcctaggactttgggaccagcctgggcaacatagcaagaccctatctcaaaaaaattgtttcaaatacattttctgtaattaatgttgcacttcccaccccacctccattttgccttttgccttttaattttgcttttggtggtatcttacagatgttgaagtatttctggggtcaaatataaccatttctcccttgtatggattctggctgtggggcccagccagggccttccctccctccagtacctctcaggttttatttctttttctttttcttcttctttttttttttttttttttgagatggagttttactctgtcacccaggctggagtgcagtggcatcagctcactgcagcctctgccccgagccccccaggttcgagcgattctcccacctcagcctcctgagtagctgggattacaggcacgcaccaccacgtccagctaatttttgtatttttagtagagatggggtttcgccatgttggccaggctggcctcgaactcctgacctcaggggatccgcccgcctcggcctcccaaagtgctaggattacacgcatgagccaccatgcccagccaggttttatttcttaagcagaaatcattatagtcacttttttttgctccctcattttgcatccttgctaacctctgaccctttgttttactgccctaggtgacaacatgtacagctgtgagcggtgtaagaagtaagtgagccttcccccgccttctccctaactgccgtttctgtgccctacatattccccttgggttcctgcagagagccccctataatcctgccttcccagaagggagccgggtggagggctgcttccctggcccctggccctgatgccggacactgatgctggctcgtgcttcctccccaggctgcggaacggagtgaagtactgcaaagtcctgcggttgcccgaggtgagccagtggcctcggcagcctcctcctcagctatctcgggatgcacaccagcacacaccaggcaggggctgagcctgctccactgctcgggcacttctgtgctgcaggggccgtggagactccatagctttggctgagaaacctctgggaagggttggcagggggcacatttttccaactgtgacttggtgccctctctcggtagcctcagcacatgttgtctaacatgttgtatgagggcccaatgggaggcaggtgtgtgggacactgggttaccacccccagtgagacagctatggctcctgccagctgcagagtggcgggaggagagctggtccagctggggctgttgccaggggtctttctgaggagtaacgtctgagtggggcctggagggtgtaggctggtgtcagcgtcgtggatggaaggcacagaaggaacagacaaaaccccagtgcaggagcaggcttgtccgcaccaaggaaggcacgtgtggctggagcaaagaggagagggccctggcagagggggcccaggttggggctgtggtggctcggggaggctttgtggcttctcaaaggtagtgccgacagaactggtaaacttgatggctcattgcagctcttggggtccagttctcagcagtggagctgggagtgatctgtgtgacttagagcgagcccagtctggcccccacgtggaactcttggatttgttccaatggagtcagcttgcatgatcccatcagctgtcctgggcccgtgggcaaggctgcgagggcccgcatcatttcttcctagatgaccggcgctctctctgtccccgcagatcctgtgcattcacctaaagcgctttcggcacgaggtgatgtactcattcaagatcaacagccacgtctccttccccctcgaggggctcgacctgcgccccttccttgccaaggagtgcacatcccagatcaccacctacgacctcctctcggtcatctgccaccacggcacggcaggcagtgagtcatgtcccctcccctgccgtccccatccgctaggatccctgtgacccgtctgctctgccgccgcaggtgggcactacatcgcctactgccagaacgtgatcaatgggcagtggtacgagtttgatgaccagtacgtcacagaagtccacgagacggtggtgcagaacgccgagggctacgtactcttctacaggtgggcgctgggccaggcctggtggaggaacctcaccatccccgtcccctgggacccatgggccttctgggtgtgtgtaggggacagcgcctggattaagccagggaagtaaggacttggattgttaagaaacagccctctggctgctgtggggaacccaggaaggcagcttggagccttctccagggccctggctggcggcacagggggctgctcacatgtccaggacccgtgaaggacccaggaggtggtggacagggccggtagcccgaggtgcactgggatgggggctctgcatgtgtctgaaggtggcagccgtcaggcacagcttctcgccccctcctcaccccacaggaagagcagcgaggaggccatgcgggagcgacagcaggtggtgtccctggccgccatgcgggagcccagcctgctgcggttctacgtgtcccgcgagtggctcaacaagttcaacaccttcgcggagccaggccccatcaccaaccagaccttcctctgctcccacggaggtgaggcgccccctgtggtgggagagcagggtgggcagctgggccgagccacagcttcgctccctgtaccttcttcccaggcatcccgccccacaaataccactacatcgacgacctggtggtcatcctgccccagaacgtctgggagcacctgtacaacaggtgagagcctgggaggccaacttgtctccgtcctgtccagggcccagctgggcaggaaaagaggggagggcagggaaggaatgccaccaggaccccacaccacactctggcctccacgtgggcagcacagagccgccttcacttgtctcatggagaatgacacatgtcgtttgtgggaatccgcttggatccttccagcggcaagggacaggaaactggctgaagcacagctgagtgtgttggccatctgctgaagcacagctgagtgtgttggccatctgctcttcagccttgaagcaggacctcccttgggctgtgggcgcgctgctccgttgcaggctctgtggtgctcacacagaggtgcatgcaggcctgcgacagcgctgagggggcactgatggcttgagggggaagtggaaggcagtgatcactctcccctccctggtaccccgctcaggccgtgtctctctctcccaccctgggcacagattcgggggtggccccgccgtgaaccacctgtacgtgtgctccatctgccaggtggagatcgaggcactggccaagcgcaggaggatcgagatcgacaccttcatcaaggtgcgtgcggcgaggcggcgcgggggcggctctgccagcctctgcctggggcagctggggacttggggacagaagaatcctgtgcagtccctgagcaagtttgaaagcagtcttttgaggctgggcatggtggctcacacctgtaatcccagcactttgggaggctgagacgaacagatcacttgaggtcaggagtttgaaaccagcctggccaacatggcaaaaccccgtctctactaaaaatacaaaaattagctgggcttggtggcaggtgcctgtaatcccagctacttgggaggctgaggcaggataatcgcttgaacctgggaggcggaggtttcagtgagctgagattgtgccactgcgctccagcctgggcaaccgagtaagactccatctcaaaaaaaaaaaaaaaagaaaaagaaaagaaaggagtcttctgcggggaactagatggccaggtgtctaggagggcttttcctggtgggagggttggcttgagtaagtgaagcctcatcgcccgggtgctgttgagcttaaagaaccagtagatggatcccattctcagccttggctgtgttattttgggctgaattattctttattgtggggccgtcctgtgcattgtaggatgtttagcagcattcttggcctctacccactagtgctagtgacaaccaaaatgacctccagagattgcccagggtcccctggggtgcagagtaccctccctgccctgggtgagaaccactgggctctacagactgcccaagataaagcaggaagtgaaaaccaaggtgcaaaccaggactcaagtgtgactgtgtttagaagagggacttctgtgagggagctgagtgcaggcgaggctcctggcgcactccctccctgccacgctacttctaacagggttaggacgtgttccactcacagggagggcctggtgagagacactgagggacgcccgtgctttgtggccattaggaaatgattctgctgcctgggcatggtggctcacgcctgtgatcccagcactttgggaggccgaggcaggtggatcacttgagcccaggagttcaagaccaacttggccaacatggcgaaaccccatctctacaaacaatacaaaaattagccaggcatggtgatgtgtacctgtagtccccgctacctggagggctgagtgagttgggaggatcacctaagcctgggaggttgaggctgcagtgagccgtgatcatgccactgcaccgcagcctgggcaatagagtgagaccctgtctcagaacacaaacgaaaaagagactgtcagggctgggcctagtggtatgcacctgtggtccaacctactcaggaggctgaggtgggaggatcacttgagcccaggaggtcaaggctgcagtgagccatgattgcgccgctgcactcccgcctgggcacagagtgagaccaccccccatctcgaaaaagaaaatgctcctgtcagaaggagagctgcctctctgagcagataggcacattctattcaaccggagaaaattagcatctcccaggccgggcgcagtggttcatgcctgttatcccagcacttttgagaggtcgaggtgggcggatcacctgaggtcaggagttcaagaccagcctggccaacatggcgaaaccccgtctctactaaaaacacaaaaagtagccaggtggtggcacacacctgtaatcccagctactcaagaggctgaggtgggagaatcgcttgaacctgggaggcagaggttgcagtaagccgagatcgcgccactgcactccagcctgggtgacagagtgagattccttctcaaaaagtagaatctcccttgtggtctcagttgggtcaaacagttattgaagagacccacaaaatgttaccaccgtcctctctgagtgatgggtgtgttcattttgtttgagcttgtctgggggtttgatttttcaccttgagtatctggtgtttttgtaagactcttgggtgagggactggggcgggggcatttgggaaatccttgctgaaggtaaatagagactgacctgccctctgtctcctcccgtccctgcccgcctgccagttgaacaaggccttccaggccgaggagtcgccgggcgtcatctactgcatcagcatgcagtggttccgggagtgggaggcgttcgtcaaggggaaggacaacggtgagctgaggggggacctggcacttacctgccctgggggcctcctgggagatgggatgctggcaggggagggctggcacacaggggctcctgcaggccccatgcctgcccccaggtgccacccatccagggtgaacagagagcatggggctttgccagtccccagtggggatcactgtccccacccagaggcaggaagctgctcctgctctgcgccccctgcccttctccactccctgccatgcccagcaagctgctctgccctcctgcaaggccctttcctcaggggagtgtgtcgcccgaaatgacagatttgtcatctgactccttggatttacagaggtggagacaggccccatcacaagctcccagggtcccccaagtccccagtgaagaacagcagaaccaagccatggaagcccacaggctctaaactattaaacctgcattaaaaatttcggctggggcgccctcggggcataatctaacctgtggctccggggcccggcagggtgggtagagcccacggttctgctcacgggacccttggtgtggagcatgagcacccacctgtgcttgggaagggaggcctcattgccatcccgctagtcggggaaggtgccagggccaccgtgaggcctctctggtggtggctgaggccttcagcatggctgtggttgagaatgtagctccggagccctcgccctggcctggacgctggccttgccttctaccagctatgacctgagtggttacttcaccttcccaggcctcggctctgtctctgtaaacctctgtcttgtcctgtggttgccgaggctaaatgagatagctgggcagaggggaaggggcgtggtgagcggcagctgccagcagagataagggcatgggccatccaccgcagctcctgcggccagcacagagtctgagaccatctcgtgtgtcctggaaattccctctgctgggtcctcagactgccacagaggagcattgggtggctcaggcgcctcatccattagagacttcacgctgacccccaggcctggggcggccccacttgggatggctctgctgctgtggagggtggagggcatggcaggggctgaacccgagcccgctgtgtctgttgcagagccccccgggcccattgacaacagcaggattgcacaggtcaaaggaagcggccatgtccagctgaagcagggtgagttccccctggggtcagccaggctcctctctgcccttcctggctgccaggctgctgcccagtcccgtccttccaggagcccccttaccacctgtcttagagtcaggctgagacgtccacctgagtccagacccaggcggctgagagatggcccaaggggcttggtctctgcttgtgtcctccaggtcccacccctctgcctgctgctggccttgcccaccctgctgtttatgtcagccccacccccaggaacaagggacacagccagagatgtgttatccggggcccttagcgggatggacattcctctgggaaatcctgatttccatctgacagctttgcatagaagccctggttgccgtcttcccgcttcggggcctggccctgcggagcccccactgcccaggccggtggcttccttgaggaggcaaaggtgagcctaggggtgcctctcgtgccctgcaggagctgactacgggcagatttcggaggagacctggacctacctgaacagcctgtatggaggtggccccgagattgccatccgccagagtgtggcgcagccgctgggcccagagaacctgcacggggagcagaagatcgaagccgagacgcgggccgtgtgatctgctgggctagtctgtaagtcgccccggctggtccctccatggcactctgggtcctctcctcactctccagagaccctcacatgtccttttgaacatccaaagagcaggtccctgaaagcaccttcctggaggatgtgggagggccctggacatggcccggccccactgctgagtgcccgtgtccccacagccccatgtgccccaccccgcggaaggcgtgtttgtgcccagaagagaggccgggctgctgcagaaccccgccgtgtaaagaggcagaaaagttggtttggtttgcagtaacgctgcaactagaaaatatatgcacttcaggcttgttgaaacgaccaagactctgtgacgttaatttgggtctttgtcctggcagtgcctctgccagtcactgtcatcgttgtgtcccccacaactgtcctcttgctagctcggcccagctttgtccctggagcccgatgctacccctgtcagacagaggctgcggcctgggccagagtcagggagtagctgctgcttcacggcgtctccactgtgcgattggcccggagccccgaagactcggagggagctgctcagggccggtgagcgcagccagaagccctggccagtgaggagctcacaggtcctccctggtggtcccgccgcacctctgcatctcctgggcgtcaccaggaaggctctgaagtcccgggctgctctcagcacttctcctgcagactgaagactctggactcattgctgattggaacaccaggaggaggttggatttctgccagtgggggatgtttctggaggcagctggtcccccacaccgcgtcctgctgagcctgccccctggattggctgtaatttgcctcgaagttcagcagttcatcttcatgggaaatttgctgagcccccaccagggaaccggatgatgaaacagggatacctcacagcttggccatttgaggcaaaggcagcttcccgagctgatgctaaagaagacagactttcccttcctcccagcagcagcagtgcagagcccacctggagggatgtgggggctgtgcagggtgcagcgctcaggtggatcctgggaagcagcctctggatgctgagtggagggagccactgagcacagcaaggcaccaaagcccctggagaaaccgccagggcgaggtgcgaccatcatcaggatcaaagcagacggggcgtgggtggggaaggggctctgggaccagaccccccacactactgcgtctttgtttctatcagtctttgtagaagcaggtggtggtggaaattccagcaggtgggtcccgcagaggccctgaggcctcacttttcggatcttctgtcccagatcctgctccctccctgctgagcctggggttcccctggcattggccccagccttctgaaagccggcgctgcagccagaggccgcacgctgcactgtcgcgacgcagagaggcttctgtgcaggctgggatcgggccccatgtctgtgctgtctagtttgtgttcaaaatgtcagaataaacacagaataaatgttcccacggccacacagtcgtctctccttcactgcagttctgttactggagggaaggtgaggctctccgccacgcggacagcccgccaagccctggggctcacattgcacatcaccaggcccaggagggggctttccatgtggctttctgaaaccagagaccacctggaggctgtggaggtgagcagaagaggggacccagctgctataaaggcctattggcatctcctttcctggaatcagccccagcctcagagaagtagggccagatgtggccagtgattgaggccagcacatcccacaggctagtctccctccagccacccagacaggcggctccagagtggccgtgagcagggggttacctcccctttgcacactggccctgggcgttcagcaatactggtgttcagtagtctgagttttttgttgggtctcattttgggggagagaagaacttgagatttttatatataacttatcaacatttatttgtgaaatcccattgttgcaggaaaaaggggttccgatccagacccctagagaaggttcttggatctcatgcaggaagaaactcaaggtgagtcgcagagttcactgagaagagtttactgaaagctgctcaggtacagagtagagcgtcctcagaaagcaagtggagggatgcccgtcgctgttttcaactcctcttatgtaggggtcttagctatagaaaagctacgctgtgtctgtcaggtgggctgacagcctgacacagtggattgctctgttgatttaaagaaagccatccttggcatcttagtgcataagcacatcgaagcctcactgtggtcatcttcaagcatacactgttgtgtggcatctgaaccttctccatcgtaggagtttgtcctcgcaggcgttacgtagctgcttcctcagacgtaaacatcttaggttgtgactggcctggactgtgcctaattttttgttttttgagatggagtctcgctatgttgctcaggctggggtgcagtggcacgatctcggctcacagcaacctctgcctcccaggttcaagcgattctcctgcctcagcctcccaagtagctgggattacaagcatgtgtcaccacatctggataagttttgtatttttaggagagacaaggtttcaccatgttagccaggctggtctcgaactcctgacctcaagcgatctgcctacctcggcctctcaaagtgctgggattacaggtgtgagccaccgggcccagcctcccttgctagttttaggtggagccgaactcaaaatgatgtcaccctggctcccctaggcttctgcttccctgccgctatcagatacgagcgtacagaaacatttcagcgtatgcaaggataacacggtgacaaggaaccaagatgacacattgccagttccatggaaagcctggggcccctccggagtcggccaccttgcctgaccccagaggtggctctttgcatgtggttccctcatcccgccttttttttt

SEQ ID NO: 658 - DNA, 569680 bp, Homo sapiens
  source 1..569680: mol_type = genomic DNA
caagcgccgagccgggctgctgcgggctgggagggcgcgcagggccggcgctgattgacggggcgcgcagtcaggtgacttggggcgccaagttcccgacgcggtggccgcggtgaccgccgaggcccggcagacgctgacccgggaacgtagtggggctgatcttccggaacaaagttgctgggccggcggcggcggggcgagagcgccgagggggagccggagcgctgcagaggcgcgggccggagggctggcgctgatctgcacccttctcatctggagagcggacccctggctgcccggaggcgagccccttcccggggggtgggggcggcaacgcgcgacccagcggtcctgcgccccaccctccctcctccgcctccagcgctcggctccaacaaaggggcaggcccgcagcggggaggaggaggaggagccgccgaaggagcgagcctctctcgcgcacaaagttgtggagtcgtttttcctcggagcagggaagcgggcagcagcagccggccgcgggctttctcccgccgaggggcgaggaggagcctctggctccagaagccgattggggaatcacggggagcggcgccccccttcttttgggtcatttctgcaaacggaaaactctgtagcgtttggcaaagttggtgcctgcgcgccccttccaggtttgcgctttgactgttttgtttttggcggaactaccaggcaggaagattgcacaagtaaggggcgttttcagtcgggtgtcaatttctctttctttctttctttttttaaaatttcggttcgtgtctgcttctccaagctttatttttttttttaaatacatcgcaccaccaaactaacactcgcacacacccccgcggttactccgtgtcaaactcctagaggagcccttggccagctcggggtgcggcggtggcgaccggcaggcgaggaggcccgcgggcagcaggtaagcccatgcattattgaagcctcgggctggtaatgtgactacagcccccgagggaatggggcgggggccgggaggaggatggctctttctgtggttcttccgcctgggatcggcgtcccgagctgcttcccaagtcccagagtcgaagatgggagtaacttttgcgtgccctttcctcggggcctcagtttagctccccgcggtgcgagagagaatgccggaggcgtggagagctcgggcgtggaggtccttgggatccgtactagttgtgaacgatccaaacttatctgaccagctctgtgctgcctccctgctcccctaatcttcctccccgccggggtgacagagtcgccctccgtgcatcgcgcggtgcagggcgctgggccagtgatttgcaagaggggacgtggcctcttaggagagtctgtcacagacacccgggcccggggaaggcggggctccggcggtgtccacaggagagggtgggcagagggtggctgtgtggtcggcggccagcggagcgcttcccagccagccgcccggcggggaacgtgcttgacctctgggtggttgctgctcccaagggtggggctccggagagtgtggcgcgatcgccaagctccctggcagcggccctggagagactgaggggacaggaggaggggggcgccccattggtgtgtagtcccgcgcagtcgccggctctccttttccggactctggggatctcttgctgcaactgacaaggtaattcatgccccgctttggcccggggtccgaggctgtggttgctcaaggccacttaaaaaccaacaaagcaccaattgaaggctgtgcaactttcagatggcaggttgttcaaaggattttttcctccaagcctcagattatgaaagggactcattccagtgcgtttttcgaggaggagggagaaaacgttgcccgacctccgagagagctgtgggaccagcactttattttacaaggaactgcagagctcgggttctaactccacggccccgctctctgaggtgttcaggacagggcctcctctttcccagccttcaggtcagccggatcaccagggccttgcgggccagttccccctgccgcggttgggagggtcagtgcagcggtcgccgcggccagagcgcgcggagctcgggggaggccggattccctaggtctgagccgaccctcccggccgcccggccgggcggcagcgaccgcatccattcctttgtaagttgcaccggcctcaggaagtcgatctgggccctcccggttcgttggcggtgggcgtgggagacgcagcctgcggatagctcagggtcaggggagaggtggaggaatgcgaagcttgtgggtagttctgcggtgacggacagggttggcgtggaaccattccccgccccttttaccagcctttatgggaccgatgagacaactctttaactctcctttgggtgtttacctaaaatttattggctctgtaaacagtattaatcacagtagtattaaccttccctggagcgcttccgagtgtaaatggcagttcttggcactcaccgttttcttttactgtgtttcaagcagagcagcaaactcttgtccgcttggcttccttttctactatctcaatcgttcctaggttttggttcctatagtaaattaatgaatagtgtttgcattacacagcatttccatcataatgcacactgttggatatatatgtgctatatacataaaatatagtacaaaataaaaattatatacatatattcattgtataattcctaaaatcttaaaaaattgaaacattagttttgtctttaaggctgtcaccttatgtttattttttaaacaccttatgtttatttcatacactcttgcttggtggtccatatgacagccggaagcgttctgaagggagagttagtgaatatcgacttgactggattggtttcagtaagaacatctggcttttacagaatatcatttgagggaagggaaatctagggcagaggtaacaataaattgcatttgtatagggcttgaagcttctaaagcaacatctcattcattgattctcagtttctcacctagccttctgtgaagatggtgttccctccattttataggtgtggaagacggagggtcacactgggatgcattgttcgtggtgaaactttgattctgtctcctgagaaccaaagattctgcatttggcaattagaaggagtcatcctttgccttaagtgtactcaaattcctctggccattaatggcaagtaacctcagtggctatcactatttaaatagccttctgttattcttctttctccccattttcctctgtactctgatcaccttttctgctgtatctttgcaacctgtaagggattttcattatcaagaagagaaaaatttgaaaaatcaccttgaggagagtggcaagtgaaacattatagtgaagaagtgttactgataatgggcaaatggaataaagtagtgtgtaaacagttgacttttctcttttatgggtgaataaaggctttgggtagcatagaagtggagatcttggctaagaccaatagtgaagaaaagcattagacttactgctccaaagtgatacactgtagttctttccaggaaagagaatttttccctgggcaaacttaattttccatgataaacttttatagacattcttctgaacaaagtttttgattcttgaatataataaaatacacttaagaatttagcaaatcctttatagttatgtacttgaatgaaagaatgtaatcatataataatccataaatttttagcagtagtagagcctataaaaaatgaaaaaagttttttagactctcataaaatctgtcagattgatgatccaatcctttatatccaactctctctctctctcttttttttttttttttttttgagatggagtctcacccactcggtcgtcaaggctggagtgcagtggcagcgatcttggcccactgcaacctttacctcctgagttcaatcaattcccctgcctcagcctcctgagtagctgggattacaggtgtttgccaccatgcctggctaatttttatatttttagtagagacagggtttcgccatgttggccaggctggtctcaaactcttgacctcaagtgttagccaggttggtcttgaactctggacctcaagtgatctgcctgcctcagcctcccaaagagctgggattacaggcatgagccaccatgctgggcccaactctctttttgtcatctccgcttatataactcagaggcatttcaagctctgcaaatccaaatcacattgatgattcctttctcccagcctgctatcctcagtgttgcccagctcaatgactcacacttcacctaattgcctaagccaaaattggggagtcattttgcacattttgcacattggatatgaatctctcatatccaatcaattcccaaatcctattgactttctttgatatctaaatatcccacatattcacccatttctttctatctactcttgtttagaccacacttgtttcctgcatataatattacaatagaaagaatagcacaataaacacccagatgtcctttttattttattttattttattatttaaaatttttatttacatggagtagagacaaggtctcaccatgttgcctaggctgatctcaaacttctgggctcaagtaatcctctcgcttaagcttcccaaagtactgggattacaggtgtgagccacctcgcctagacccagatgccctttaacaagttttcccacttactttattttttttgagatggaattttgcccttgtcacccaggctggagagtaatagcacaatttcggctcactgtaaccaccgcctcctggattcaagtgattctcctgcctcagcctcccaagtagctgggattacaggcacctgccaccacacccagctaatttttgtatttttttttaagtagagatggggtttcaccatgttggccaggctggtctcgaactcctgaactcaggtgatgcacctgccttggcttcccaaagtgctgggattacaggcgtgagccaccttgcccggcctagttttcccacttattttacaatacttactgcatttttctgtctgtctgtgtgtatgcatatatacatctacatacatatatcaacctaaatatacctatatcagtatagacagatatatgctattctgtttgaacttaagttgaagataccatcacacttcattgctaaatatttcaccacatgtctcttacaatcaaagacattctcctgcaacaataccataattaatgttaaagaaatttaacattgatacaataatattgtctaatacatagtccaaattcagatttttcaaatgatcctcaaatgttttattttaaaattctgaattcaatcaaagattacatttcattgtcatgtctatttagtctcctttaattcacaaagctccccctctcccaggtaattttggttttcaagacgctgacagttttgaagaaaccaggccatttcttttgaaaactagccacagtctagatttgtctgctcatgagaagattcacgttcaacatcttggcaaggatattgtgtagatgatgtggtgattttccattcaattgcatgatgccccatgattggttatgtgaattttgatcacttggttaagattaggaatttttccccaacatattactatgaaaaaattctcagacatacagaagagttgcaagaaattttcattcagcattcatatacccatgagctaggttccttaatttgcattttgctatattctgccatagtcttcactggttccccacatattactgtggtctacctacaagccacaatcgtctttttttttttttttttttttttttttttgagatggagtctcactctcgttgcccagggtggagtgcagtggcgtgatctcagctcactgcaacttccacctcccaggttcaagcaattctcctgcattagcctcctgagtagctgggattacaggtgcacaccaccatgcctggctaattttttttttttttttgtatttttagtagagacagggtttcactgtgctggccaggctggtctcgaactcctgacctcgtgatccacctgcctcggcctcccaaagtgctgggattacaggcatgagccaccgtgcccgtcccttgacgatcttttaaaaaggccaatttgaccatgttggttccctccttcgaaccatctactggctccccattgctcttcagataaagacacaaacccttgacctgttctccatggtcctatccctggtcctgcccagcttcttcacctggttcaacaggtacacttgtctcttggctgtcttctttccagaaacactggcttgtgctccattctttgactgctccatgattctttctgccacttcacataggaagctcttaccttttctctttctgtttccctttttggctaattaaattcttgtcatctttaaaggcttggctcaaatgtctcttcaagaaagccttctctaattgcccagggcaggtcagactcctctgctgtgtgctcttaatactctgtgcttctcctttgtatgatttgtagtctgtcagtattgtaatgaaataattcattatgtaattaattgcttagtgtgcataagcgccgtaatggcagaggctatgtctcttgttcatagtcataacaccattgcctggcttggtgctttacacgtggtaggcactcaataaatatttggtgaatgaatagttactacgaataactatataaaatatataaatacattttttcaagtcagtactttcccttttccttttaggtattgatgtcaagctgaaccatcgtaggaagttgaaagccttagaaagaggacttggtaaagtttttggattatcttgaaactctggcaagatggccaagtatggagaacatgaagccagtcctgacaatgggcagaacgaattcagtgatatcattaagtccagatctggtaggtaaaggaagctcaagaaagctatggatttttatgtatttagaaaacctatgtttcttggattgatttgcattgttcttgcaagaacttcttggaggtgaagttcttttaagaaactgaattctgacaaatgactataattttgtaaaaggtatatgtaaaaggtataatatctctgagtgtcctatcctttctcaacccaattttgtgcttagtgaaactgctgcttgtagctaaaggttgttcatttggaagactactccattaaaataaaatacgaccgaacatttctctttctattttctggaaattgaagggattatatgcttaatgtaggaagtgccacagtttctggcaggaaagatctttcacagtttgatttcattaccatatatcctcacccccatccctgttcatagccattgataggccaacaggtgtcctaccttgaaatatcttatgagccttctcaaggtaaaattttcacctaggtaatctaataaaccagactcagacagattcatggttttcacacgaacagttaaattggggtcctcaggataccaccccctcctccaatctttttatataaccgagtgctttttgactctggctgtacagatgaatcaactggggagttttaaaaaacgcagatgcattggctccattccagacccattgaataaaaatttctgtatttttaaaaagcttcaaatatgattctgagacaaactcaaaggggagatatttttgaacaggcagaacacttctcagccttgaaaattacacagaactccaccctgagtgtgaacactatacttaagtaactttgaaaagttactttgaggtataaaattacatccagtgtcactttaaagacaaaaaaggaacccaaagcctgtttttgctgtgtgaaccatctttatgttctgttaggagcttgtttcttattatgtgaaactgtagaaatacacagtgaaaataagatctaaattaactgtcttaaaatacacattttcctccatgataccggtgttggttgattgataaagattttagttattacagatttggctgtaaatatgtagcaactattgtgtagcttgacgggtcttttgaaggtatagcttaatatcttgttttaaaatatgctttgaggatgttctcttcctgtaaaattctttttgttttaaatgttttagtggtataaggtactacaaaaatgtaagggattattaatatcatcttaggagtacggaatacatattcagacatatgtaaatataacagaggaaaatggaagagagacgatttaatgtctccatactagtcattttctataaattgtgaggaggtatattcctaaatagttttctgagtcagccttcattctagtaagacctttgatatttataacttgtactttagccgtgtccataaaagagtaattatctaatttcagaaataccgtgtatatataatgaacatataaactcccaaactattttaatttaaaattatcttttaaaaaggctgatgaacctaaaatattgctggagaacaatttggcaaaaatgataacatgtttttaacacatgcatatcaattaactgagtaattctgtttctagagtttttccctaggcaatacataaaaaggtacactcaagaaattgatcacagtatcatttataatagaaaacattgtaaacaccatgaaaatctaatattaggaattggttagatcattatttcccaaagtatttcgaaaagatcaaaagttctaggattgttaatgtgtaattcacaaaaggatgttatggtcaaatagctttaggaaatagttgtttaaacctattattctgtttctttactctagcacatctgaacagatcatacatgatctcagtagaggtaactaaattagggtatatccataaagtagaagattaagcattcataaaaagtgatacagatgtgtgtgatgtgtgtgtgtgtgtgtgtgtgtatgaatatagaaatgtgttcttgatatagtaagtaaacaagtatgtattatatgaagtcatttatatgaaaaatgttttttaaaaatttagtgaagtatacaataaatgttaatagtggtcatcttggcatttgagattattacttttttttttgctgatttatattttctaaagttcttcaatgaacccacattactgagttcttatatttttaaagattatcaaattgcttagagtgtttagatgccaaggttatgactattactttttttgtggtggcatctacttcaaaacacactgaaaatttagttgttacatagctcagatatgaatcacattcttttggctgaattatgttgcaaaagccagtagataaatttggatttgaatggacccattagtcccaatctggcttcctctaagggactttttttgattcttttaaggcaaatgcttactatacagaggtaatatttcatggtactctaaaacttacatattttaagagatttttagtttagattaagtcataggaattgtctacatatcatatatgtattttaaagatcctctgtctacatgctgtatgccaaattggttgcttttccattttttaaaagggaatactttcctttaggaaaattttgatcctcatctgctcttccaggtttcttttttggggggaaattggatgaaagtggggggacggagagtgtggtttctgctctccaaatcctcgagtttggacaatccaaaaggctggcataattaaattggcataataaaaatgtctatgcattttatgttaagttattgtgattatttttattgtcctcacttagtattactttgtttcatgccattttgaatattataattttttaaattttataattttaaagccatttctaccatctaaacagaaataggaagttgtcaagggtacgtaatgaagtagtttcataaatacaaagccatgtatttatttatggttgtagtatacttgccttgggtttgggtgagtgttagaaaggaactggaaagaatttgatctataatgaccaaggatttggtgttgggtaaaagtagacctgtctttctctaacttaaaagcacatatgccaagttcatcatcaagtactgtattattaacagccttaattagtaggctttagaaagttcaacaagttagtaaatattttgaaacaataggccaagactaagaatttttaaaaagtgaaatttattgccagtagagtgtgtgatgcagaaagtactgcttggaacattttaaacatgaaataataaaatggtttgggatgcatatacaatcgaagaatatcctcactgctatttcattcaataattaacatacattaaagctagtaacacagaataagtcatccttttctgttgctgtcagtgttgttgtggttttatcccagagccctgtagaaagagtagacctcagggctaaggacagtgtgtcagctggctccatgtggagttcttgacagtttgggattatagactctcagctgggaaagaactgtttgatgaatgaaatagttgggcaagcttcacatttttggataattcaatgtgttcttcaagcgaccttgggctggaagcctgtgtgtaacaattttatcatttcttcctttgcattttctcttcttgtctaatcttaggatctaattgttgagggaaccttaaacgccctataacccagccattcctgtgatgtgctcacccagtctctgtttgcacacctccaatgatggcatctcactgctgctgctgatgatgacgattctagcaacttacactaattgaacacattctgtgtgcagatgtggtgctaacagtttaatcctcacaaccgccattttgcagatgataaatgtgagccatactgaagtgatttgtggcactggacttctttctatttctccaaaggcccagtgtgtcttcctcagggcctttgcacatctctcttcttccatctttgcctggctggttccttcttgtcatttagatgtaggcctaatgtcacctcttcagagatcttccttgctgactttagaaagtagctctcccagtcactcttgactgcatctctgtatttacgttccctgtgttgttcttagcactctctggtaccttttctggtactgtgtgttcattaatagccttcccactagaacagggctccccaactcccagggcctggactggtaccagtccgttgcctgttagggaccaggtggcacagcaggaggtgagtggtggctgagcaagcactaccgcctgagctctgcctcctgtcagatcagcggcagcattagattctcataggagtgagactctatggtgaaccgcacatgcgagggatctaggttgcctgctccttatgagaatctaatgcctgatgatctgaggtagaacagtttcatcccaaaaccatccccctcatcccttggaaaaattgtctgccatgaaactggtccctggtgccaaaaaggctggggactgctgcactttaattaactccccaagagcagggaccaatacatccctggtactgagcccaatgcctggctcataataggtgagcaataaatgtttattcaatgataaaggctacagagtctggaagtgccagagctggcatttgaactcagatgatctgactctagaaaccctgcatttgacctctatggagtgcccagtctcctaactcacaagacattttattccattgctgctcggtgactcttcttcattttgtgcctaattctgtcccttacacattttgcactgtattaattgtatttatacagctcttctatctctttttttgtagttttcaggggtgggaccctggactgtgaggtagagctcctctggaccccaggttagtatctcagagccctgacaagggaaggccaattgtaagagacacagcctactgcttctgggccagttgcatcctttcttgatttttggctctagtctctgtcattctctgttgagttagcaaaggggaaaataccagaggacaaacagtcctttgggtggaagatagagaaatggataatgtgtttctgacatgaattcctttttctcttttcttctgactactgctcaaggcttttaacgagctgaagttaaaaaaaaaaaaggtagtggatttcataaggactgacatttggcacagtgtaggtcctggtccgatgcccagataggtatctgtggtactgaaagagttggttgaggagtgtaggggaaggaagcaaagggttggttgaggagtgtaggggaaggaagcaaagagagaccagtgaaataaaaataaaacaaattattaaatatgaaatattataccaggttacatttatagcaagcctcctgaaaatctgctatgtttggaaagtaaacttgcttaacaagattcaattttatgaaaattctgaggaggattaccttatttgtttatctttctgaggcctttcttgaggaaagacagtggttaagttgtatttaggcagtcatcggtctatttctttcttttatgtttaaagcagtatctgtgaggggatttttctaaacagctcaagggactgtgaaaaaatagttcattttttgtttctcctgaagctttccttggctggaatacctgtgctttgaagggaggtctttgagcaggtttgtttttttccatgagccctggggatttgtagtgatagacagtaaccctgatggaaattcaactctggcagagaagggcagctattcttgtcctgcttgtaaagatattctccatgttgttacctcattatgctgaagtagtgcaatcatgagaaagtttttttgtattaatgtgattctcatgacctgttactatggttgtgaaacttttagaggagatccattcccgactggaaaacgtgaattgctgaggatgattctaagcaaaggaagtacgttaattatatagacagaacagagaactcaattttattgaaccttatttgtacccagaagtttgaactagatgctgatatgatgatttttctgggaacaagtcaacatgcaagactatttgagcagctgtaaatattagttaaaatttaatctaaagcaatggagaaagggtactctgctgaagtggtttcagatgcattggctggatttttttttctccccttaaattgtgtggaggcatagacatttactatgttatatttttatctttttatatgccttaactgtttaataataaatagacttatttcaatatttgaaatgtgaggcagtatgagttcttaatgtatacttactctcgagatgatggctcttggactgagaaattgaaaccaggtcccagtcctttcgcttttacttcctgtgacactggatttgcacatgtcaattccaggaagcaggtagtttccagcatccatgtggttttccaatctttgcatttgtgcctttaaacaaccaaatacctgacgtttattaatatcctgtggggctcttctatcagaagcacattctcttggcccggttcataagggaaatgtctgtgtatgcgcatctggcagctaagattaaggtttacagtggtataacctcaccttcacttttaagaaattaagtttaaaaaaaatgcagatctgtctttcatagcagtggagctcaacaacacatagagcatgagagtcacattttttgtgtgaatattttcgaatgagccttttttggtatgtggacgggtggctagttacattcagttcaatccttttaacatttaattatggaacaaaatcttttttcaaagtgtagagaaaagcatataagggcatttctgatgtagcagaggaatccaataaaaaatatgactttgtgtctctaaagtggtacagctttgaaattaacacatctgtataatttcaaaagtatgatctctttagatctttttctttaatttcatagtcttaatttttgcaaatttcttcaactccattctctaattaagattttggtatacaatatttatatgcaaaagatttttggtgcaggaaataacattttgaggttgatactaattgatttgttcacttgcccctcaaaggctacgtgtgagtcatgttatttaacattgatccagtcaatatgtagatttatgcacatgcttttattttgaaaactaggttttgagcttctcacatatggagttcctaattcaagctttatgtcagaaccacccttctgggtccagactcagatatgtggggtggggtcccagcatctggagttttaacaagttctgtgggctattctctttagtgctcttaatttatagacaaggaaggcaggtttaaaagtcatagaaccaaagtgaaaatgatctgcattttagaggagcaaggaaagctacaacgtttattatttctacttataaacacttccctttaaataatttgaaaagataatagatttcatgatgttgggcattttttcttttacactgtattttgaagagtttgggttgtgttgggtgaagttaaaagtgaggaaagtgggtcaggagagtgatgaaacctggtgcatttcttattttggcccattgaaccagaagatgataccaatatatctagtgccgacatatttctccactgcgctccttagttattgctgcagtgtgttcaaggtcttcttgctgtgagtgtaacatcacatcttgaactctttttctagggaatgcatcagcttagagtccgctgatgcattcattataaaaatgtattgtgtatattttctattacattatttcaaagacagacgtgtttttgaatcatggtgggaaaaaaactcctcacattcaacctctatgctagttttcttatcttaagggggggtggttagagaaatgtattatatatgtattaatatttgcctccctgttttttaattctaaataggtgacatatttaatataactatgcttgcttttgaaataatttgcctaccattctttaaaatgagtgaattttaaaagatgtatagtgatttttatgtgaagatgaattaaagagttaagtgacatagaccaccgtagcattttccctatggatctgtaaaaacagcccaaaagtcttgtgatttttttttttttttgagccgtagtcttcctcttgctctgttgcccaggctggagtgcagtggtgccatctcagctcactgcaacctctgcctcctaggatcaagtgattctcccacctcagcttcatgagtagctgggactacaggtgtgtgccaccatgcctggctaatttttgtatttttggtagagatggggtttcaccatgtcagccaggctggtctcgaacttctgacctcaagtgatctacccacctcagcctctcaaagtgctggaaatacaggcatgagccatggttcccggcctcttgtgatatccttatattcagttaaccaaaccaaatcaagtcaaataacaaaccccaaaccttttatagaccttgagttatttgcagatctttggggttatttacctgtcttttgagctttaatcttttacctctttgaagatacaggaagggatctttatttcttctttgataaaataaccttcagagtgacttgagatacggaattgcttctttgtatatcattgtgtggtatttgagatcacatctcaaaatttaatgagacctgctcctcaggcagttttaagattaaggatcaaaaagggagccactggaaaggtgtgagtggctggtaatctatgttagaacagagactttggtgcagaggttggccatgttcatatgtggagtaagttttcatgaaacaggaggaagccttttcttatttgaaactaagaaactgcaaaataaaagtaataaaataccccgaagcaaatagactttaaaacaacatttggtcctaagttgtatatgaccaatttcttaaagtgattgttatattgccagttttgaaattatattatcttttaaaatttaaaatgtaaatattgtctcaggggtgggaggatgaatctccatcttatttagtgttaaaggctcctggacttaccctaaagcccagctttttcggtggggggctcataaataaaactgtgtgtgttctagtttactctgttacctcatctagttcctttaggtgattagaaaatgccgtattagcaaatataaaaaggtttacttttgtgtttttacatgtgaaatcaatggccagttctataatgttaacatatcagacccttaattatatattaactcccattttgatagtttgtatagaaaaatcagagttgacttgaattatttgaacttgcatacgctttttcaagatacgtaacgtgttgtaaattagaagagtgttggtgttttcggaacacatgcatatgcttgctgtctcagggcagccttgttgggcatttggtgtcagacataccttattctgagggccttggcatcaaggcagattgctcagagagggggtctctctgcatatatgtctaagggagacatttagggaagtctcatgccatcctatctttctttctttctttttttttttttttttttttttttgagacagggtcttgctccattgcccaggctggagtgcagtgactcaatttcagccctccgcctcccaggttcaagtgattcttctgcctcagcctcccaagtagctgggattacaggtgcctgccaccatgcttggctactttttgtatttttagtagaagtggagtttcaccacgttgccgaggctggtcctgagctcctaacctcaagtgaaccgcctgccttggcctcccaaaatactggattacaggcgtgagacactgctcatggccaccatcctactttctaacagcactgccccaccctccccctcgccccaaaaaccaccatgaaggaggcagagggcaccaggtgaagactgcccatggtccttttcttacctctgtgacttcgcttgttttgtgttctgggcttgattgttctccttctccctgcgtccccagttttgcaacctccatctttaaaacatcagcatcagtgccaccaggtgttctgctctctgtgctatctgcatgccagaatcaatctttcccacgtgttcactcttcatttctgtttgtggcccttctggcttgtgtatgtctatatgccttttttcatctgactttctgatgctagcctttagcttagtctccacacacacagtaagtgcttaacaaagacttgtggccgtgtgcagtggctcatgcctgtaatcccagcactttgggaggctaaggtgggtggatcatctgaggtcaggagttcgagaccagcctggccaacatgctgaaacctcgtctctactaaaaatacaaaaatcagccaggcgtggtggcactcacctgtaatcccagctacttgggaggctgaggcaggagaatcgcttgaactgggaggcagaggttgtagtgagacgagattgtgccaatgcactccagcctgggcaacagagtgagactctgtctcaaaaaaaaagacttgctatgccttttaatggttttaaaaattacacttgcttacatacatacctcattcattcagcaaatggttattgttcattcattgttagatgctgggctcagagataagcaagacccacctctgttcttaagatgctctcaggctagttggaaagaaagacatcaataaacatccccacacaaaccagggacacatggagggaggaaggatgtcttgctttggttggaatgagggtaggtttgagtaagagagcgtgaaagaggcaaggaatttgaggtgtgccttgaaggatgtgtaagaggcaacgctgtggacagtgtgggaagaacattgcagatgatgagaaaagagcaaggcatttgaagtctgtccctggtaactgagtgtggctggggtaatggggatgatgggagaagctggggtcagatttcgaaagcccttttgaagcagggtttatttgatctttccctgtaagaagccactacaggattttaggtgagttaatgactagctcagaactgtttttcagaaagataacttggctggcagcaggaaagatagatttggaaggtagcagagttagggggaggcagggaacaggtaagagttgtgaaaaaattgaggttaaggagtataaggacttggaccagagtggtacaagaggagactgagcaggggaaaggatgtgaaaagtggttagcagttagtaacagggtgtgcaaagcctcaatgtaaacttcgcctttgtgggatttgttagttagtaacagtatgtttaaagcctctaggtaaatttcacctttgtgggactttttagtaacagtatctataaagccgcaatgtaaacttcaccttggtgggatttgctttatgttttcaatgaggtatgtagtttttcaaatcgtactgtaattcagattttcaacactttcggttattagctttttctctagaattttcttgatcaatttcttaaccgtttacagttacttctacttcttactgaagttgactactgctgtttttctcacagtacctcttggtcagtttatatggggaacttcaaattcagttcagctgcaataggatctgtatttttttctatatatattctgagagaagggtcatgctttaggaaaaagttgatgaaaatgagaaaagagatggtttattcatgtctatgcagtatactattaacagttctttgaaaaagtagcaaagaaaggtaatgttaatctcatcttaaatgaaggtaaaactcttgcacagctaagagaaaatctatatactaaaagagtttggaaaactacttcagaggaactttaattaaagagtagtctaatgtgatgctgtgaagataatgccatcctctattagtaatttcagcttcaacaaataggatagaataaatgcaaattaaaaataaattaggagcagatgttgagaaatatcttacatttagggaattcttaagtggtagaagggccctggagttcagttaataaagctgggatgctcagaaattataataattcaggtaacaaatgctttccttaatgtgatgctctgctgtggaggttttgggaatagaagaaagaagaggctgttattgtcatactgtttgtaagttcatctttctttacattcagtggataactaaaatctactatatatgctgatatttcagaaatggtggttcccttaaccttcaagaaaaaacaaaagctctcatttgtaaacacttgcaagcattcttgggttgtctcttggtggtacccaagtttttgctttggccggtaagagacttttgcatagtactttgttgccttgcctctacaacatgttaggcttgtggattggcgcatggtgaataagacacagttccagttgtcgactgtctgtcacctagagagggcaggtacacaggaatttaagaaaacagattaaacaggcagttacacagttgtaaaagtaaaaacagcacagattgctgtgtgagctcacgggagtggtacctgacatcccagggcttcaaggaaggcatcttggaagagtggatatctaagctgagatctgaaagaatgagtggggatgtggggaggctgttaagacagagggagttgatgacaagaggtttggaggtgagaattgtgaggttttcaatatggctaaagcaggatgctggagaatgaagctgagaagagtgttataagccatctttaggagtttgagttgtatcctaagcataatggtgaatctttgaaagggctttaaaattaaaaaaatttatatttatatatttatcatttttaaaattctgaagtattcaatctaaaaaaatgtacaggaaatgatatatcagatatgctcgtgccctcatttgaaatttatcagctgttaatgttttgacttttttttttttttgaaatggagtttcactcttgttgcccaggctggagtgcaatggcgcgatctcggctcactacaatctccccttcctgggttcaaacaattcttgtgcctcagccacccgaatagctgagattacaggcatataccatcatgcccagctaattttttttgtatgttttgtagagacatggtttcaccatgttggccaggctggtaatgttttgacgtatttgatttaggttgtattttaaagagctaattatgtcagcatagataaatcttaaaaacaatttgactacaaacaaaaatcaggttgcacaatgtattgaatggtactgtatataaagctcatatacctgcagaaattgccctgcagtgtttatgtattcatattataaatatatagcaaaatacaaaaatttttatggaaattataaacactagatttctttagagatagtgagagaggaggttcttcagttttatctataatatttaattcctcaatgaaaatagaaatagaatcttaaattaatatgaaataatgctgatttgtgaactgagtgatgactgtcttaagcccagttccttggaagtaggatttgagacagagatttgtgtgcacttgagaacaattcctgttaatgaaagaaatgagggaagaaggactgggccagggaaaagctgaagtgtagttgagttacagcagggccaccattggatccatagggaatgctggtgctgggatggcccttcagagatttcccaacttgaggcaatgtgttgagcctggggacctttgccttgaccagtaggcttttggctgaccctgggaaggaggtgaggtgaaaatctgggcaaggtaacttggccaagggcagttcctggacggatgctcagctatgagccctcagctgctgggggaatgaatttgtgcattgccttgcctgaaaggcagatctggataggagattcactgcagtcatggaccttgtaccattttcttttgcctattattgtctatttctatgtctgaaagatatgacatattaaataaaaaaagcttccaatttctaggagcagtattcaccgaactacttccctgacacatacatacctcacaccctgcacacaccacacaccacaaaccgtagctgtaatatcaggttacatactttctgttttattttcccttttctctgtgtttttggttacttgagatggcctcctctctctcactcctggtttgggaaggccttgcttcctctgaaagcttgtgagcagagggctgatctgatcagatttgctcttctgagtggtgctctagaagccacgtggagcatggatggtgtggggtgtgtgctggatgaggcaagcctggggttctggaggacctttgggtggctgtcacagttagaggataagaggtattgaagccaaaactgagattgaggtagctgggaaggaggagaggggagagtttagaagctttaggtaggaggcagacctgataggacatggtggtggtcttcagatgatgggtggtggatgggatggagagagaagcctggtttttgactttaacactcgcaaatgaagcctttctttctaggttttgtggagagggcagtgcataaggggatagtaagtgaagttctagattgagttttgaggtgcctggagatatctgggaaaaatatgtaatatatatatttctcttacatgtatgagactggcttgggctggggtctgcccttgaaaactggcagctggagtcttgagtactttcctgagtcattttttgagctctttgcaagataatgttaaaaattcaagaggccgggtgtggtggatcatgcctggaatcccagcactttgaaaggccgaggcgggcggatcacctgaggtcaggagttcaagaccagcctggccaacatagtgaaaccctacctctactaaaaatacaaaaaaaaaaaaaattacctgggcatggggtcgcgcacctgtagtcccagctactcaggaggctaaggcatgggaataatttgaacctgggaggtggaggctgcggtgagtcaatatcacatcactgcactccagcctgggtggcagagtgtgactctgttgaaaaaaaaaaaaatcaagaactgttgcatattttatttatctttgtattttctgagatatttttgactgaccctaaaatgagcatctggatggtagatgacggcagcggaagatgaagaattaagaagtggtttttgatttgtaatattttttagtagatattattagttgatgccgcagttgttgactgtatttatctcccaagggcataggaagcccccttgcagatattactctacctagcctgactgggtgtttggggagggagagaagaggttaacaataaatcctgcaatatgtgcagaagtttttacacttgtgtttctgcatattttcttagaaaaagggtccacagttttcattatattctcaaaggagacctatgacttaatgaaaagttaagtcttgttagaggaagagtgacatattatagggttatgtcttcataatgtttctttttttctgaaattagattggcagtccaatacgctggcacgaactgagggtctcacacttttgctgtaactcaaattctggtccttactttacttctactgccttaaagccactcaaacaaaagacctgattgctagaattaggttgagaagacacaaagtttgaagggcaaaatttctgataatgtttgacccagttttgcatataatgtatttttatttgttgatgaatatttcccttttgttgctaaaagtggcaaataatcagacatagattactaattaacagtctgcctcagttttttttttttttaattaatgaaacttgggcttcatcaagctcaggtggaatggatatcacagtgctttattttttctgacatcaaaagaaatttctttgtcaaagtgtagacatgtttgttgtgactgccttttgtgtgggttcttttctcccagccctctcctactacaggagagagagataatggccctttgctcctcattccgcattcagaccagattccccagctgcaatctcctgccatcggattgcatcaccaactcaacctaattggtgagatgtcactccctccctccaccgctcactctcatttctcagtgagtttagctctgtcactctctctaaaagttactcttgttttagtgatttgggtgtaaacattgatgatccttctaatactctgtcctcttaatttctctaagttctctttctagtgatcttgtctcccagtgtggtgggtatattctggctagaccaggtcattgtttatggtggcagcccctctgtcatctgaatttaagcgtcccattttttcggtactagcatggctcactgcaacctccgcctcctgggctccagcaatcctcccaccctcgggtagctggggctataggcatgtgccaccacgcctggctaatttttgtatttttttttgtagataagaggtttcaccatgttgcccaggctggtctcaaactcctgggctcaagcaatccatccacctcagcctcccgaagtgttgggattacaggtgtgagccaccatgcccggctgactttgcctactcttgccctaagaaaattgaagcaaaccaaagaggaatccagaaacttcaataccacatctatcctcaaccagaacccacccaaggccaccctaaccgtgtacattgtacccatcctcctttacttactcaaagtcacctcccttctctcttctgcatccctatgatttcccctttagtggatccgcttacaaacatgctattgtttttcttctagcaaaactttactttgatcccacctgtctctgtagctaccacgccattcctctggtcccctttatgaaagagctcctcaaagattgtatgtaccaacatttgcagttcgtctcctttcattccctcttaagaccactcaaatcaggcagaccccctaccagtccagtaaaactgctcttgtcaaagttattagggacctccttgttgctaaatccagtagcctgttctcagtccttaccttattccacctctcaatagcatcaacactgctgatcactccctcctccatgactctttcttcatttggcttctaggacaccccacacgctcctggtttcccacccattatcttttgctgattcttcctcttaacgttggagggcccaggacccagtccttggacctcctctctgtccccactgttgccgtttgtcatctcaccagtatcctggtttaaatactatctgaatgctggctcaaatttctatctctagcccagacctcttcctctgaactgcatacttgcatttccagttgtttacttcacatcttctatgttcagatctgaaaatctgaactcctgatctcccgtaaaccccaaagctgatcccacagtcttgcttgtctcagataaaggcaatgtgattcttccaattgccccagttttggagtcatctttgtagtcctttctttctcgtatacccacatccaatgcagcagatcctgctggttctattttcctaatactgaatttatacagaatccggtcatattttacgatctccactgctactgtcctggtctaggggaccattgctttttctggaattgcctccttacttgtctctctgcttcctcccttggcccatggaggctggtctgaaccccacagtagagggatccttttcaaatcagaagtggatatgttgcttcaggtttccaagtctgcagtgactccccattccagttgtaataaacgcgaaagaccttacagtgatctacaggaccctgtttatcctgcctggcttcatctccccttactagtttgtgctcattatatgaggcaggcacctcccaggtcagggcctgagccctcttctagcagataaccttgtggctaactccctcctctcagagagctactgtgccagtcaattaaaatagcaaatccttccctcattagccctctccacccactttatcctgtttcattttttcccatagcacttactggattatgctgattgtctttttccactagaatgcaggtattttgtctaggttgaatcactagtatctagaacagtgcctgacacatagtatgtgctcaataaatacacgtgtgcagaagcaaatcacatttttcattgctttccacaagtgtgagcctgggctacatagtgaaaccccatctctacaaaagatataaaaattggtctgggtgcagtggctcatgcctgtaatcccagcactttgggaggctgaggcaggcggatcacctgaggttgggagttggagaccagcctggccaacatggagcaaccctgtctctacttaacatacaaaattaaccaggcatggtggctcatgcctgtaatcccagctactcagtaggctgaggcaggagaatcgcttgaacctgggaggcggaggttgcagtgagctgagatgagccattgcactccagcctgggtaacaagagtgaaactccgtctcaaaaaaaaaaaaaaaaaatggctgggcatggtagtgcatgcctgtggtcccagctacctgggaggccgaggtggggagacagggatcactgggcgtggcggggggtggggggcgtgcctgtaatcccaactactggggaggctgaggcacaagaatcgcttgaacccaggaggcagaggttgcattgagctgagatcgtgctactgcacgccagcctggataacagagcaagatgctgtctcaaacacaaacaaacaaacaaaaaacaaacaagtgtgcaatccctgagaaaaatatcagttcaatctttgttgatctttattgtcccgattgattagctgcatgtcagcctttgactgtgtttcccagatgctcacgacagatcgatcacttgatgttgttttcaacaggcagtcatgaaatgagcagactgaggtcagtgtagtatagatatttgtcagcgtggttgccaactgcctttcctcttctaagattgccctttattgtgtgattatattacatttttagttggcatgaaaatgcccatttagtgaaatgatgaggatcttcctgggggaagaattctggcgtaagaagctttcttcagattactaagcactctaaaaggtcccaggttatggggctctggaaagtaacgatgcgaatacttcacttggttatgtgatttttatttttgccttggaagtctttctgcaaacaagtcttccagtggaggctcattttaggaatgtgacgatgcattgctgataggtaggatgtggctttctatacagcagagtttggggggtgggactggcaggtgagtagctcaacccaggcttctgagggtccttcatgtcttttggaacacaatttgaaaatcactgctttaattgctaaattctagaaaacctggatgccctatttaaaaaaagagcttagcttagtgtcaaagaggaactaggttccagttttagctctgcagatcaccagctgtgtgaccttgaatatgtcactcaagctgtctgcacaattaattgatttgtttgtaaggtaaggagtatggactagatgacctcacactgatcactttctaagctccagaaaacctaattgttaatgcttaattgtgcgagctgtgctcgggaagggctgtgttctagtaccttcttcctcatcactgtcatttcagtattatctacactgatcttcacaaatattctgcacacttggattctaacctgcaatattgctgttggggttatagaaatatagattatatgatggtatttagggtaagcatttttatctctaaaatgagttagatatcaaggatggcatggtattagattacacaatatttgaaaagaataataagaaaaatcctgcaggatttaaaaatcttattagtactcttctgtagaaatactttagggaatggttcagacagtatcaggtgctgtgggtgtaagcatggccacctgctagctctgtgaacctggacaaatggcttagctgctctgtgcctgagtaaagtagagatagtaatagcatcaacctcctcgtgttgtaaaaagtaagtgaattaacatatataaagcaatttggggccaggcgcggtggctcatgcctgtaatcccagcactttgggaggccgagacgggtggatcacgaggtcaggagatcgagaccatcctggctaacacggtgaaaccccgtctctactaaaaatacaaaaaattagccggcctgatggcaggcgcctgtagtcccagctactcggaaggctgaggcaggagaatggtgtgaacccaggaggcggagcttgcagtgagccgagattgcgccactgcactccagcctgggtgacagagcaagactccatctcaaaaaaaaaaaaaaagcaatttggaacatagaagcactcaagaaatgtaagccgttacctccatacaaataattattataatgtgggtttatttctttccagtcttttaaaataagcatgtaaaaatagttttaatcatattgcactaggaagatttgtttttgtttcttaaatatatacagaatttccctttttctgcttctttatatttaataacaagacattctaggatagactaagccttttcatggctaattgtcctgtggaattcttttagtttttctcttccatgtttatatatttgatatgattttctggtagaattcttgaaaaaataactgcatcacacagtagctctcctctcccattttattttattttacttgctgaggctggatattatattcttttggctgaagtcaccatagtggattcatacaactaatttccagccagtttatgtagatcatttgcaaatgtattagttacagagaggctccaggggtgtaccaaagaaacctcaaaatacagtggctcaaataaaatcagagtttatttctttctctccttacagttcagagttggtgggtgatggagggtgggaaggtggctccgcttcatatggtctctcagggatcctggttccttctctcttgttctgcctttccaaagtgttgttccattttcttgatgaggcttgcccctcaacactatgtcaagttctagtccaaggaaagagaaaagagaagtaaaaaataagcaattttttaaaacgtgcatggccctcaggttgcattcctgatttcttttcacatcccactggctgctgcttagccacgtggactcatcttgctgcaagggaggttgagaaatatggcttgtgctgagctagaactgtggggatggaggagaagagcaggtttctgatactgaaaaaaaaaaaaagaaaagaaaatagaaaggagaatggataataataaatatacatatgctttgatcacaatttcatgggccaagtttgagtttggaattttccaagtcctcagattctatgacagaacatggtggtggagagagctgccccctggctccagtttgcagactttcccctttgtctgcccatgctggctccatttggcactgggaagggctttgcacccaagtttgtggtcagttggccaagcacccatggtctcccactcttccccacttgcaaacagtagtgtggtccacccttgcttgggaaagagcccagtgctcatttgagcagtgagtactaggaccctgtgcctctagaccgtgctttaggacttgcatatccccttggtcctctgatttctctatttctgggggagagatggggatggaagagggtagagtgaggccctctaaaagtcaggatttaaggcaaggtccttgcttgtctaggtctacaggtgatgctacaaagagaatgttacattgattcagttcttaaaattttcccttttcctcatgcttctgtttcattaatattcatatttactttttataatatacatgttatgtctttaatacactaggagtagaatatttgtaatgaaatggagtgctgttttaatggatgagaaaggtagggaggggctcagagagggaggctggagaatattcacttatttagcttaatgttttcaacagcttaaaaaaagagaaaaaacaacctttgagtggcccttgtgattaaatggcagtttgcccagactagagggagccagcgttgggaataaaaactaagattcactttgaaaatctagaaaaaaaaaatgactacacaagtcataagaatgtgcttgatggcttgggttgtctgagtgcaagtgaagtagggcgcaggcctggtttccgcattccctgtctgctcagccttttagctcctaaccccatccactccctagagctggccagcccagacccaggacctggatgctgacctcttcagggcggagctgttgctgtgctcagacatcgtgacaacttgttgatgggaaatgtagctgaaagtctagcacaaaaagctgctcttgggttggccagcgaacctccttcatggtaaaactccccatcccttatccaaatccttgggaccagatatgcttcagaatttatgatttttctttttcccatttcagaaaggctatggcccatatgccctatgttacataaagcctccagaggagtttgggacagtaccctatcatccaatatcttcatcattctgcagaaaatgtatgaatatttacactaagtggaacacaaacagggttataaatagcctcaggtcagttcaggtcacgttttgctgccaaatgggttatggaaaaagcctttggtttccagagcttttcagatcctggcattgtggataagggattgtgcacctggtatggtgactgctttctcagtgtccatttggtgccattttacatgtattgcatttgaagtactcacaacaaaaatacctatgtatatatatacctctctctatatatttttttccttatttatttatttatttatttaacagctaaggaaacaggtttcatgagctcgaatggcttacacaagatcaagaggagatgatctcctttgcaaacagaggccaggacccagggcctgggcacttagtgggctataagagtttctaatttgcttgtttgaagcattggaacataagccagcctgcagaatcctgtttcacatttaatggtagctgaaagacaatactgcagtaaaagtgccataggatgtaattatcctaacattgtttcttaagaaaagacatcttaagttcaaccagcggggtcaggaagtggggtccctggcctgaacagtggcttatcttccttcctggatggctggcaggggcagtaggtcagtcagggcactgttccaggacccagtggcagtgtgggcagcactgtggtgagatgggaagagaggaaggaaggttcgggtgcttgatgtgcattgaaggggtcagggaagggggaattggctactggctgaggttctgacactagttggacagggcccgatgccaaactcttgttcttgttctcacctagaaattgccattagttagtgctgctgctgggcattattttaacttagaccaaggcagcccttttgcgtgggcaattagataacggcgcccactctggagagacacagtctgatggacacactacttcgtgggctgtgcctttgtgcaaagcaaaaggtgttctttcctccgtgccgctgtgctggctggatttcagcgtcgtttttcaccttggcctcgtgcctttatgcagtggacagatttcaggcagcttggcattagtaggaatctacctgaaaagcactttatatgtgtttgaatccttggcatgatctggtgatgatctggcagaataggtattaccatgatttgccagatgagaacgtcatggcgctgtgaactgctgaaggtcgcctcggctccattgctatctggacaggactgttccctgtacactccctctttcaaaatggaagaggcagctagaggatttcaggatacatttccctcagttgtttccttctgcactaccttctcatctttcatggttgtattaaaagtggggcctggcacagtggctcacgtctgtaaccccacactctgggaggccgaggcaggaggattacttgaggccaggagttcgagactaggctgggaaacacagtgagaccctgtctctgcaagaaaacaaaaaaagtctctaaaaaacaaaacaacggatagactgatgttggttcctatttggatatgtgtggcaattggtggctcttactgaccccatagctctcattcaggtggtttgtgtgatagtgggcacaatgttgttgccaattgagttgaaaatgctgtcatgttgaaagaaaacatcggaaatgagagggtctgggtaaatatattagtagtatagctgttgctttgtttgcagtctcttcacttacattactttcatttaaaattaaccataatctgttaaacttttacttccaataatgtatgggttcaggagtcttagccaaagtcaatgtttttcacaggaagtatctggatatacattaacttttaaaattgtaaccagttagtttcactataaaagttagcaaagtgtgaatgaattgatcgcttgctaatctggagcacacaagggaaattaattttagatggagaaaatatttcctaaaataacagagggaggcagagagctaggtgtatgtgttgggcctttcaaatatattatttcatttactccctaccataattttatggggaagatataattgtcagtgtttcatagatgaggatatgcttgttattagttaggacttagagtaagttttttatcatatttaaaaaatgccccatctaattctgaattcttacagagagccacataggaagtaggattttgaaaaagcaaaaatcaacaacaatgcagagaggaagaaatgagtggattggtaagataaggccatgggtagttcacagaaactgcttgctttctctaacatgcttgctccctttggtaaactttggatgcatatttgtctcaaagtgtcatattagacaaagcaataagaaaatggttagttttaagattgacataattcataaattctcacaaatacatttgatgaaataaggcagtttgtgtttctcctggtcctgaggacccccaaaactcagaacctcataaataggacagcgaatgatatggaggaagctatttcttcagctacatgtgataatctagatgaatagaactctcatttgtggcatcccatattgtaaaccagttacagtacagaaaatcattttaaaaaaagagagattgcaggaagttcgccaacgatttgccttaatcctgaagccaatttaaacattccaatctgatatatatatttattttagtttattttttttgagatggagtcttgctcttttcggagtgcagtggggccatctcggctcactgcaacctctgcctctcgggttcaagcaattctcctgcctctacctcctaaatagctgggattacaggcacccaccaccatgcctagctaatttctgtatttttaatagagatggggtttcaccatgttggccaggttggtctcgaactcctgacctcaagtgatccacccacctcggcctcccaaagtgctgggattacaggcatgagccaccgcgcccagccccaatctggtatcttgataaattaccaaattgttgtaatagagattagtaccttctcttacctttctttttataaattaattttttaaaatagtcctcagactttcctgtcaaggaaccctttgatagttgatcatattgcatggtactttttccattgctttatgtaaatttctgctctcacagtcagtaaatctgaacataagcatttctttctgggctttgttctgtcctttcctttcctggaaatagcttccagatgggattgttttcttttgacaaacctcacgactgtatgtttcaccattttttgacctattatctctttttgagtttcattttcggcttaggtactctgcttgtaggattttttttttaacaccctgtgatatatactgaaaatactttgcactgttaagagcctgtacaataatactgttaacgatgaagtgctgtggacttctctgtaactcccaattcttcaaaggaaaattttccttcagtgtattccatctttcttacttcttcaagtttatttagggaataccaagaaataaagtgttgcttagtttaattcctttataatgtctttatttttatttatttatttattttctgagatggagtctcattctcttgcccaggctggaatgcagtggtgggatctcaactcactgcaacctctacctcctgggctgaagtgattcttgtgcctcagcctcctgagtagctgggattacaggtgcctaccactacgcctggctaattttattttattttatttttgagaccgagtttcgctctatcgcccaggctggagtgcagtggcgtgatcttggcttactggaacctctgcctcccgggttcaggtgatcctcatgcctcagcctcccgagtagctgggattataggcacttgccaccacgcctggctaatttttgtatttttagtagagatggggtttcatcatgttggccaggctggtcttgaactgctgacctcaagtgatctgcctgtctcgggctcccaaagtgctgggattacaggcgtgagccactgcacctggcctataatgtctactgaaaataaatctagctgggcatgttggctcatacctgtaatcccagcactttggccggcgtaggcaggcagattgttggagctcaggagttcaagaccagccttagcaacatggtgaaactcctctctacaaaaaatacaaaaattagctgggtgtgatgccagcacctgtggtcccagctacttgggaggctgaggtggagggatcacttgagccttggaggtcgaggctgcagtgaactatggtggtaccactgcactccagcctggttgacagaatgagaccctgtctcaaaataaaacaaacaaaaataaatttgcttaaaatttttttgaattaaagttaatttttataatatttagttaggtttttttttttcctcattattctttcacatttttccaggttaaggtacatgaattttactcttttaatgttgtggcccagggtagtctgtctgccaatcaggctgttaagttgtgggtctgacattttccttggaaatgctgtttctgggcatgttagactttctgtacttgtgtgttgccttttggcagagacttcgacacttaaggatttgttgataaaatgacaaattgtttcatgaggcatttacttggtactagacatttagatgattgtttctcggaataacttggttgactaacatctttctgcttcctgtcgtcatgatcacttctgcaaaggacgaagcctagtacattttctggtagaatcttatataccataagatttagttgaaacattgtatgtttctatcttcagtttttggtcccaagttattttaagtaattttttctttttctgttgcccaggctggagtgcagtggcgccatctcggctcactgctaccttgatctcctgggctcaaatgatcctcccatctcaaccttcagagtagctgggaccacaggcacatgccaccatgcccagttaatttttatactttttgtagcgacaggctggtctcaaactcctgagctccagtgatccacctgcctcaccctcccaaagtgctgggattataggcatgggtcaccatgcccagacttaagtacatttttttttttttttgagacggagtcttgttctgtcacccaagctggagtgtaatggtgtgatcttggctcaccgcaatgtccgcctcctaggttcaagcaattctcctgtctcagtctcctgaatagttgggattacaggcacgtgccaccacgcccggctagtttttgtatttttggtagagacgggctttcaccgtgttggccaggcttgccttgaactcctgacctcgtgatccgcccgcctccgcctcccaaagtgctgggattacaggcgtgagccactgtgcctggtctttaagtaaatttttaaaggtgtaaattctgcagactcggataaaaataattattctattgtgtcttaacagatcgttataattgtgaagattaaatgagttcaaagtatttggctaatattgttaggggctgttgcttttgttattattattactattactattacgtcctggcttcattcctgctctctctttccctctttgcatcattgcctctgactatctccaggctgctgatagtgagaggggccgtctcccaatccaggttaccaggtctggatgaatggactctgacccacttttctggccactggaattttgcctttgtgaatattataaatagtaatatgtatacaaagaatgattatgaaataatcaattataaattggttggaatgtgtctgatgctcagacatacacacacaatttgacattctggttagatttctctgtgcaggaagcaagggaacaacagagcagtgagaaatcaaaggagagaagggtattctggggcaaaggacagtttccataggtagaattacagaggtaaaaccattaatcaaaaaaaactagtgcaccactcactcgatttttccaccccttcctttcagtcgtggtctgagctttcgcattcaggttgaagatgaactagcatgtgcctcatttaatactgggaacttttatttacctgagtctgctttttgaaatctgttaagtgttgagtttctatttgcaccttattcaccagatttacttattgtctttccctgctaatggggatggagtggggggaggtgctcgtggcaggcactcagacaagctcgctgtgcagcagtggctctgagggcacagctgtttggaatcagctgatcattttcaagcatctctagctcatcatattaaacacagttgcacacgtttagtggttgcttaattttaacctgaaacactgtatgaaataatttgatgtataagaagtattgtagtgataagaagagtagcttaatggtttttcatgttttctatgccagccactatttaaccgttttactatttacaaacacacacacacacacacaaccatatacacccatatctgggtatatgtgtttgtctatatacatacatatatgtgcatgtacacacatatataaattcatttgatcctcacaataaccctataaaagaggcacttctattttcgcctttttacagtcaggaagccaaggcagagagtgggtaagtagcttgcccaacacgggtaatgagggacagaggtggagtttaaacccaagtagctgtgccatatcttttttttttttttttttttttttttgagacagagtctcgctctgtcatccaggctggagtgcagtggcgtgatctcggctcactgcagcctctccctcccgggttcaagcgattctcctgcctcagcctcctgagtagctgagattacaggtgtgtaccaccatgcccggctaatttttgtatttttagtagagacagggggtttcaccatgttggtcaggctggtttcgaactcctggcttcgtgatctgcccacctcggcctcccaaagtgctaggattacaggcctgagccactgtgcctggccttttttttttttttgagatggagttttgctctatttcccaggctgaagtatagtggcgtgatctccactcattgcaacctccgcctcgggttcaagcgagtctcctgcctcggcctcccgagtagctgggattacaggtgcctacattcacgcctggctgatttttgcatttttagtagagatggggttttaccatgttggccaggctggtcttgaacttctgacttcaagcgatccacccgcctcggcctcccacagtcctgggattacgggcgtgagcacccggctgcccatactcttaatcactaccctggagtagttctcagtgctgagcctctaactccaagcaaatgataattaaataattaccacaatatgcccaaagttattttattacaagcaaatttatgaaatgatgcagttttttttcacatggaaactggtttcttttgtttaccttggatggatgtttgtttgggagttggctgttttcatttgttaaataaatattttagttgggtgtttgtgtagcaagtgatcttggtggctccctgcagtgtgtcctgcactggtgagcacctggtgagcattcactgaatgtgtctgatggatttaccacactcatctgtgaacctgtagctcagctaatccccctaaatctgtgagtggcccttctcagctgccctgcaggggactttgtggagcaggaatttattttgaccagcaaactacccttgtgactcatcaccaagagcttctatcattctctagcaggatttggaaattaaagacactttgactcagaaatatcttccacacagggactcattaaatgaaactaacatcctggtgggcaaagtgtaggagaaatagtaaaagtggatttcggccgggcgcggtggctcacgcctataatcccagcactttgggaggccgaggtgggcggatcacgaggtcaggagatcgagaccatcctggctaacacatcctggtgaaaccccgtctctactaaaaatataaaaaattagccaggcgtggtggcgggctcctgtagtcccagctactcgggaggctgaggcaggagaatggcgtgaacctgggaggcggagcttgcagtgagccgagattgcgccactgcattacagcctgggtgacagagtgagactccgtctcaaaaaaaaaaaaaaaaatggatttcatgggccattggaagtcactgtcttaagcagtgctttgtacctggggactccatccatgtgtaaaggattagtgagcaggatacacatagggaaatgtgtagggagtgtgtgattctgatctttttagaggcaaatccagtttaaatgtggagagtggcactattttggcttcctagcaattccaggtctaatgcttacatttaagtaacaaagatgtttgcattgatgaagcataaccttggcaattcttaaatttggggattggattgactatatatatgcccttcagtaagctattaaatcatcatgaccactaggtaaatggtggattaactactataaagattatttatgagtattccaacatcattcatctccatccccttatcaagattaatagacaaattattatcatttgaatgagagccagaagagccctccctccctccaattaatgatgggctggaaaagagcaaggagatcactttttgtgataatctgttttaaatgttaggggattttaaacattcttacatcagaatccatgaagcacaacattaatatttattttgcttaaaagtttgcagtcatttagtagcaattacttttatcttttccttaagctttctcaaaaacattaaggtttaaagaaaataaaagaacactttattaaaatttctctctttctcttccttgttctctctttctcttgcttgtttttttggtcatatattaaacatatatcacgatatgggcaaaatattttttacaagcttcttgactgccaggggattaatcaaactggctgtatgtgtccttttaaaccaagtaatttgggcgaaagcttgcaattttatgaatatgctggaaaatcttacctttattagcttgagaagttttctccatccttaggtagccaaagacaattttactcggttttgtggggaacattggtatcagaggtgaagttctttctgatctgcaaggtggccttgaaattatttctgtatttcaccatattactatcaacaacatttgttttcctttcagccaggatgagaattgctatctgttttcagaacttggaggcagacctttaggggtcagagaaagctgagcatttgggttctagaaacctttacactgggtgtatttttatttcattgttaatatctcgatatagatttgctttaatacatataggtgaactttgagcttctgtatttattttggcatacatttttagagattaaatttatttaaatttttaataaaacattaatgcaatttaggatttttagtacatgaagtaaaagtaagtctgcatcgaggtccccaaaaagcaactgtaatttggctgtattgatttaccaagtctaaagtaaaatttcacatttgaaaataaaggaaaggaaatgtaattttatgctatgactataaaatttctctctataggaaatcactgcatatttcaaattggacttaatcataaagagaataattaactgacagttacagctgatgttattaatattactgtaaaaagtctgggtttggccataaagtatttagcaagactaccttttggaattcaagactatgagaaccacgtcttgcttgcacactgctccatgtgaaactcagtgccaggctcatggaaatgggaccattttaggagtcttcctgtgtataaattaaagagagcagaacttacagttaaaagtggtagagcaatttgtgtttatcattgcttgctgtcatgttgctactataattacaataagagaacaaaaaggaataaactcctgtggtcaaatggaagtggaaatgaaataaccattgatggggaagaaagacgatggtggagtggctttcttatgcatctcacagattttgcaagccctctgattgaaagttgccaggattgtttgaggttggttcaggggaaagtgggagaagtttgaagctgaaaactgagagtttggttgagaatctttaaacagcacactttgactctcagagctttccccttcttcctcacctgcacaggagaacagagatttatatattttttctggaaaaactgaattccaacttgggatccttagcccagagagcatggcaaggctctgaatagacatcaggaagattaactgacaccaggaggtgccccagttcctgaagctatacctgtctgctatagcttgaagtgtcccccgaatttcatgttttggaaatttaatccccagtgcaacagtgtttggaggtggggcctaaaaataggtgattaggtcatgagagctctgctctctttcttgaatggattaatgtcattattgcagaagtgggttagttatcttgagaatggccttgttataaaagtgagtttgactctctcttgcttacttgctgtcagtgtatcctgccctttcacctttttccatgggatgatgtagcaagaaagccctcagtagatgccagtgccatgcttttggacttcccatcctccagatccttgagccaaataaatttctgttcattataaattacccagtctgtggcattctgttgcagtagcatagaatggactaagacagcctcccatcgctgatcagccaccaattaaagagtgcttttactgggagtacagtatagttacagcacgtaaattgattaccttactttgagcccaccagttggtaggtgacacccaagcctatgcattgttgagcctcattttgaaatgggaggggctgctaggagtcagcagatgtttgaaagcctccaccagtagaccttatattaacacaaacaaaaggaaggagccacttaggggaaataggaatgtggcctgtatcctcagagaagtaggaaaataattgtgtctttgaaacaagaacagaatgtgataaaaaaaaaatcagagaataagaaagagatcttggaaattaaaagtgtgatatcagaaataagatctcaagtagagattggaagagtggatataaaagtgataagtaaaaaaagtcttatagataatgtctgacttgcaatcaggaaggagtttataagcatagtatttagaaatgcataatctattgtcagaagaaacagataacagaggaaaggggatgcccaagcctgctgcattgtgttatcatcttattttattgaaaacaaacttaagtgcatttattacttggataaaaattgagaaatatataatgagatagactgtagaaatcattttattaaaacattttattgatagtacagaaaatgctgtactgttactttttttggcaatttcataaagctctgtgaataacatggtcccttagttttttttttttagtagccctcttttctcagcaccaaattcttgctgttgttaggcatagtcatcctaatattttttatactttctgccaggcctgagaagcttcatggctttagaaatcatctaaatcatcacattgtgtgtgtggctgtaaatatccaaattattttgaggcaagtttctcctctgatgtgacggccatgtattttccatattgctgatgatgatgggagtgttttctctgagacattttacacttgtggtatatttagctcactagtaatgaattacaaatgcaaggaacttggaatcctgaatgaatactaggagcgagccgactttcaagctgaaatggtctctttccaacattttctggctgatacaccacttttaatagtaagtggcttccttctgctcttctccatcacttgcaaccatggatggctgttgtggtaacacggaccctcacagaatcttagatctggtagatgctttaaggggccaaccagtccagttattttcccctatccctgaggaatcccactcaaggagggagaaaatgattttctcaagatgcacctgttcctatgagatgactaggggtccaaacttggcattctttctgcgtctctaggccacctggacctgaaggacagttctgactttccttcaaatctcatgccgttgttgatgctcgtctggtggatttgtacctgagaagggatgtttcgggagggattttaggcttctgtctgctgtgtgaagccgagggggttttgtgaatattctgtaagagatgtgacgcctgtggatgaaagcagacagatcaggccgaccttggcttggagtctaagttttagagacagaaaacagggagggggtgaaggagaggggaaatgggaggaggagaaggaggaggggtgccaggatcatttcttttcctgttacgcattttccttttggcgggagagagtgagaaagctcctgaatgtaactggagctgctgaactgaactggtcagaacctgtcctaatttgtgtaaaagaaatgctgtggtatttattcttccagagaagcccacataacgcaaccagggcctgctggctgcccttgaggttctgcagagcttggttttggtgtcttctctgagcctgttttctgctgaggcagcccctgggtgttgcccactggcctaactccctccaggctcggcctttcgcctctcatcaaagctcttttttccctggattttaatggttggctgattaaagtagttcatagtaaggtgttaattataactctttccggtggttatgtgcatatattcacagagttgttacagaagtaaggggactgggctgctcatggtggctcatgcctgtaatcccagcgctttgggaggccgagtgggtggatctcctgaggtcaggagttcgagaccagcctggccaacatggcaaaaccccgtctctactaaaaataacaaaaattagctgggcatggtggcgggtacctggaatcctagcaactcgtgaggctgaggcgggagaatcacttgaacccgggaggtggaggttgcagtgagccgagatcacaccattgcactccagcctgggcaacaagggcgaaactccgtctcaaaacacaaaacaaaacaaaacaaagcaaaacgaaacaaaaaacaacggaagttagatggggctgaatttccaactgctaggctagaactaggacaacactgtgagggaaatcggagtgtaatacattccgcaaccccacctgtctactatcgcaaccccacctgtctgctatcctccctttgcaagcccagggccttgatggttcaaggatgagtctttctagaaaaaagggagagaagtttctttccttttttttttttaaacaaaagaaaaacaaacatgtttattaagatatgcgtagtgcatacacatgggagtacccagacatgagtaattcaaagggttggttagaactgggcttatctagcatcttaacaaaggaacgataactttttagagaggtgatgaaacaaaggaaaatgactttaagcttccaggtgttaccagaagtttcatcaaatcaagaatattcttaggagtgtcaggggtgtctaatagttgagctgttaagtaactcttaaacttgttaatgtctcttgggaatttcttcttttagagttgttttgtattaaaaccaaggaaataaatatctttatttgttttaaaaatagtatcttaatttattaattttgtttattttgcaaagtctttttaaggaaatattatttccttttacaatgagtaaaaatacattcattcagaacaaaatataattgtttcttggtgcatcagatgtttatatctcatgatagtgatctgttaatagatcagggtttttattctttatcttcatccccccttcattgcccccatagactcctttggcagtttagtgaagccagacaaatttttttttgagacaaagtctcactctgttgcccagcctggagtgcagtggtgcgatcttggctccctgcaacctctgcctcccaggttcaagcgattttcctgcctcagtctcccaagtagctgggattacagttgcaagccactgtacccagctaattttttgtatttttggtagagacggagttacaccatgttggccagcctgatcttgaagtcctgacctcaggtaatccccctgcctcggcctgcaaaagtgctaggattacaggtgtgagccaccgcacctggccttttttttttttttttgagatggagtctcactctgtcacccaggctggagtgtaggggggcgatctcggctcactgcaacttctacctctcgggttcaagcgattctcctgcctcagactcccgagtagctgggactacaggcgcacgccatcatgcccagctaatttttgtatttttagtaaagacaagatttcaccatgttggccaggatggtctcgatctcttgaccttgtgatccgcctgcctcggcctcccaaagtgctgggattacagatatgaggcaccgcacccagcctgacaaatatttttaaatgcataaaatagagtacatggtattccatgcatacagttaccaaaatactgaaaaagtctgtgagagagtagtatttgctgtttcattagtgtgttcagtaagaacttctagcatctctaacctctctactcttctgaaataacaacgagccaaatggtattttcaagatacctgctagagttgtaaggtgatgtgaaaatggttatgatttttgctggtgacacagtcaaagctaccactaataatgtgttttgtgatctgccatcacaatggaaggaaatgcaaatttctgttagaggtcagtgaaaagatctaattgcttttcctgtccaagttcatggaccccctgcctggtaataacccctgataaagatgatggcttaaaatgagtatttgtttccttaaacctcagcagtggcagcagtgtgccacagagtgtttcaaaagagacaacaattttaaatggaaagtagtcttgggtgaatgccccatatggcaggcactgcactgggtgtagttgacaaaactgatgagctctatgatggcatctggcctcttgagtgtgtagactagtacgagaaccagacatcaaattgcagagcatacaaatagttgtttaactgcttagagggtagacattctgcagtgctgtcatggcaaatcactcggggacttcatagggacctggaatgagtgatagtttgagtggtcagggaaggccttcttgaggaatctattcaagtccatagttcaaggtggtggagggcactggctgaaggcagagctgtgtgcaggctctaagctggcagaacttggcccacagaaagcctgattgaggccggtgattgggagtgaagtgagcagagggctgtggattaaaattggcagaaagatgcagtctgcatttcactcagtagtatttcttatcctgattgaaggggcatggtttacctcttagtttgagggcatgtattatttagtgcattaatggatggatccctaaaagcattaggaattagtctggagtatgtaggttgaaaaataggttataaaattgatgagaacaagctctcttgcaagagttagaaacataaaaacaaatttttctaaagctaaattccttaacatttttcctcactcagatttctatttggcttgaatctaaggaaaacctgagaagagaggaagtgcttggcttctctgtataccaagcagtttcaacagtggtgtttgtagaaatgcataccttgctgttcctaggcagataagtgttgtcacacgtcttcagattttaaggcgacaggctccacacctggcagaggctcagacagagcagaccaggattgggctattcacagaggcaggaatgtgaccattctggtccgggcagttggggaggaactcatctatccacggttcccatactgtttggccctgtttttcaatttgactccatcaaagcacattctccagccgaggggtacacatccctttgtgacttcagaaatcatgcactgttggtttgggagtcttaactacatttggaggacacgctgagccgacgagaaatggaagtgagatctgaatccacaaacggagacggcagacagtcacaggcaggtaaagactcattgagaatgtggctacttaaattttgtccacctgttcattgaaaggaagccgaggcatgactctccgccaataattagtgtgaaaattactgagttaacagattctaaattattttgtcctctgggtgacctaggaagtttttaaaagacgttttttctaaataatgtcatgaaataagatagttacatgtaaagaatctaacaaggtcagtcattaaaaacattttctaaatatgatttattttgcttactaaccttgtaaatcatctaggataggaccactgtcagcctcagagcctggcacagaacttggcacttaatgcgtgtttgttgaatatgaatggattgggtccagtgtctaatgatacgctatgaaagttattccatcacttctccgtgatggaaaaagatttaccgaaaagtgtctgttgtatgaaagtcatatggggtagaaattaaactgtaaatgagttaaggagctgtaaccttggcgctattccaaatctccaacaattgagtagttaattagtgcccctgcatccatttaatttgtccatttatctcttggttcgttcactgtcatttatttctctctgctggtgccaagttacgtgataggctgctgggaggcagacaagcaagatctctgcttgcaggctttcaaacgcagcgattcagcagcgtggtaagacgtgtgctcatgatacatactatgtgctgtgggaccacaggtcaggaaggataaactcccggagttttgctcttcctcagagggtcaaggaatgtttcccagagaagtgacttgcaaagtggtagagaggaatgtggaagggaagaattccaggctgaggagaaagtgtttggaaaggcaaatattcagtgaatcatatggtgagatgccattttcaaatgtataatgcacctccttgctcactgtccatcattgccccatccagccacactggtcagctttcagctctgggaacaacctctgtttacagggtctttcctccacctggaataccggcccccagctcttggctatctccttctcctccttctgggattgggcattggatgaaattgcacctgcttagagaagcctgtcctgacacccacctgaagtagattttgtgctgttgtctccaccatccacacttgtcaccattgctcattgcttttgttcacttgtttgtttactttagtgttgataggtccccaagactgtgctctccatatgggcagggaccaaggttgtcttgttcacgattgtgtccatagtgccttgtacggtgcctgttctgtagggatgatagatccttgtgaatgaatgaatgagtgaatgaatgaatgaaaaggcggagtcacttaaaagaacaaaagcatttgtaatagacttgctattcctgtttattctttgaaatttgaggtaattcttaactagccacttaggatctccattaagaaccctagtcaagacctttgggtattacctcaaagtaaaacaaagtgggagtattttggatctttggaagttaacttgaaaaaatctaaggattctttaaattgaatatatagggaagagagaactcctactcagaatacttaagttacaaacacaagaaaaattcatagattaaaaaaattgaacaaagagtatcattaagtcaaaccgtttttaatagtaattttgtaaagttatttatgacactattttttatgtatattctcagttctctaaaacctgataattttggtgatttactcttatctgtgctttgaacactttattcttataattaatatcattatttttaacttactgaaacctttcaacttacgtaatcagtaatgttctcatgctgatattaaccttttatttatttatttatttatttatttatttatttatttatttatttgagatggagtctcattctgtcactcaggctggagtgcagtggtgcgatcttggctcactgcaacctccacttcccggattccagccaattctcctgccttagtctcccaagtagctgggattacaggctcccaccaccacacgtggctaattttcgtatttgtatttttagtagagatggggttttgtcatgttggccaggcctgtctcgaactcctgacctcaggtgatccacccacctcggcctcccaaagtgctgggattacaggtatgagccactgagctcagcctgatattaaccttttaattcaatacagtcttcccataacagaccttctcccattgatgggctcatttttattgctctttgttctctactgattctgtcagtttttagagcccataaaatagcttcatttctataccgtcttattcacattcagatttttcatatagcatgtcacacacagtataagacattttccataacatattatgagttgatgatttctgtcatgttgaagaagatcatacagcaacacttatcttgtaaattctcttataatgccaggtaaaaaaaatgttatgtgaaatggcacattgaaagaaaggaaaatctaaaggtggattgcttaaatgattgtgattgtttttcccattggatcttctgcagatgagaattccctgcatagatcacccaaggggtggcagatcgggcttctcagtttcagccaggggtggacggtttgcatctcctgatgtgttcatcaacaacatgatgaagccagtgtccttggctactgattccaaccttttgttctgttcttggagaaatggggaaaaagatacacttatatactagtgtagattttggttatctttatttgtgaagaaaattttttgtttacctctcattttattcattcgttcagtaaatatctcattttattcattcgttcagtaaatatttatccacccacctactatgtgctaggcactgtgatagtcactaggtattaaaaaagtacattgatgatcgatgctaagattattttcaaactattttaagagaggactcctaaattaaaagaaattatgtatcaacagacaaatgcccttttatttttttccctacaaaattgctgctggctagagaatgatgatgatttgcacttctgacatcattgcctaatgttgggtttctgtgcctgggctctttatgctgtggaggcaaatggtgctttgagtgtcttaatttcaccggaatgctgcacctgttgctggctattcttgcatatgaaatccagaccctagagtcacttgctttcatttccttttcctcctccctctttccggtgtgtgtttggggggggtgggggtggtgaggcagggtgggggcagcagattagtagcttctgtgaagagtaaccaccttcctgttccgtcaaggctatgattttagcgcccccgggagtggtagtgttgcgtcactctgtcatctgtcgccgaaagactcataatccgggcagcctcaagagtttgaggcgtgggtttgtgcccgagtttggggttctaggggaggggtgaagtggaacaggctttcagcagctgctgccgccacctgatacctggaaccttactgctattgaggaacatgtatttcctcttggcttcatttgctgtttggctatgactgaggaagacaggaggtattgcatagtatcatttactttcataaacataactttgacatctctaggcttcatgttggttcaggcaatgctctcgaaagccagggagctgctttgcaagatgcatgctatggctgaaggaacggctcaatagctgggagctggccctgaggtttaaatccactcacagcacgaatttggtgttttactttgtgtcctgaaacctcaataacctcatttttcaagtgagagttgaaatattgacacaacttaacttttaagaattttgaaggcatcagtgaaaataaattgaacgaactttgaagttcagagatctctaaaagtgaatacagaccaaattatatcctgatgatcaagtaggaacatccgtagttccagtactatagttcattgacaacctccagaaagttacggtagtctaacattccttatttaaaaccaactttgccatgtttaatttatttatacttttatagatagacagatttactactggacattctctggcagagaaaaatttcatggaaagtgaagtttaatgtgaaatggcacataagtggtcctgacttgcaaactcaggaatggcttgttgaccactgtcctggaataagagagcccagctttgttcttgtcttatttctggatcgccctttctcctttgtaccttctgacattgtttctgagttccctcctcccatctgccacccgctcctttgcaactctgtagagcattttaataacaggttgtttgtgcctgtcttgcctctgcagcactcactcccacctgtttcctcagcctctgacttctcctttcccctttttggcatgctctgacctgcctccgtagttgaacccgattcctgaggcaatgatatggcaggtccctcaactctccatctatagcacttgccttgcctggcctgggaaccggctctttcactgctgtactgcatggaacagagtaggcactgcttaaacctatcagctgcctggctctctcaaatgctctttccaggaactctggcactgtgaacccactgctgaatctcgtggctcataaataaactctcaagtgataattgtgacttgaattctctagttcttacctgaccacctcttaatatcatcctggaactgtctttatatcatcttggaaaccctggagctgatttgaaatacctctggtcagttcctcagcatcagttctgtctaatgaacacctatattcttcattgtctcctcactcttggctctaagttgtcacaagtagatgattatgtctcattcccaagtagagataggacacatgagagtgggtgggtgtgcccatagtttagacaggactatctttgtgtggtaccagctgcggcaggatctacagatgactcacacatgttaatacccacatcttctgagtggccaacatcctcagatttgcatgtgggcatttgcaagaggaagcacacagatgctgtgatcagggctgagatgcctacaggtgtgtctgctgggctgcggcaggtggtggccagtggaagacaggttgtaggtagggaaagtgttgcctcatggagggtgatcctgatatggtgggaacttcaatccagactccgacatcgccacgggcaagctgaatgacagtaaacaaccttcagggcttggggacgtcagcacactcacctgtggagagccagccagaagacaggcagtggcacaagttttctgaggtagagattgtgactgtaggtgaccaaggaacaaaatattatgaagaccacattggggttcataggctggtggccctgtaggacacttggacacattttttttcctgccaacaccaaagaataatttctaggtgtctcttcttcacaccttcccatgaagcttgaaagttctagagctcactagaaactagaaaaattttccttactatgacagcaagtgtgcttcgagaaaactcacttgctgacctttgttccacagcccagcaggttgccacctgatttataaaaacagattatggagacagtccagaaaaattactccctctttcttttttttttaaagtaatattttaaaattcctttctttttgaagtatttgggttgtttttatcaatttcgttcactgttgccttaaatgacaattcttgcctccctgaagaactcttggccttcattcctgccactacagtgagaagttctaagctggaagggccatcccagggatgactgctttaagcagccagtcatgtagggttgcgcctgtggccctggcagattggaccctgtttctaccaagtggtggcatcacttggcttccatgtagtgtttttctgttctcctgcagatcgctgtcagccactggaggcctcacccactgggttccagacagctgccacttctgtttagaagcaacactgccagtgagaaaccctgccacacacaacacacacagacacacacacacagactcacacacagagacacacacacacagacacacacacacagacacacacacacacaccacacacacacacacacacacacacatgtgagaggagggccaccctgggaggaaaccctgaattctcccctcttagcacactccttctatctactccttctatctcctggtagagggagaagctgtgtgcccctattactacctctctttacctcctcattaagggctttggtgcgattattgtctcccttttaatctcactacttgcatgcagctttcttgagaaaggttataatttaatcctgaaatacaacttctaggagttttctttttaattcatcattccaagtaggtgtctttgtctgtttccacattagaaaatgaaaccaatacttaaatatgatttccctgcttttattggcagctatttaagatctatgtctgaggtctggctccgtgtggtttggaatactttattgttattattattattattttgagatggagtcttgctctgtctcccaggctagagtgcagtggtgtgatctcagcccactgcaacctctgcctccctggttcaagtgattcccatgcctcaccctcctgaatagctgggattacaggcacacgccaccacgcctggctaatttttgtagttttagtagagatggagtcttaccatgttggccaggctggtctcgaactcctgacctcaggtgatccacccgcctcagcttcctaaagtgctgggattataggcatgagccattgcgcccagcctggaatattttctaagctctttgatgatggcggcttcgatttaactctctctgacttaattctgttgattataatgtcattcaatcccattagtatactcatatggaaacaaaggcatgatttcagattttatttatatcttcatgctttggaaaaacaatttcatgagaaatcactcagcccatgaagtaccatccttgacattacttttttgggtttgcttgtttttaaaacagtttttattggcttttgctttttataattttttgaaccataccaacagtcgcataatgagtatttttagacatgtgcttttaaaatcatgtgaaaattcttttaatgtcaacatgaagagttttgtttataatcattgctgtgatcaagaactgaggtagaatttcctagctggacacaaatgggttaaaaaaaaaacccgacatgctctttgattattggataagttgtattctaaacaatattactctgatgaagatattaaggggagttaattagattgtgagactcttgaggacagttgatgcctttttcatttttgcattcttcttgggtgccgtgtagttgatcagtatagtcatgggacttagttctgattgtagggagctgtgtgaactgcatgaagcagacgagactccatcctcgcatgggaaacctttaaggattttgaagctgggcaggtgcaggttaatagaaagatcactctgggctctgtaggagagtgatttggagagaagagcccctagaggcccagggaacattgcaggtggctctgccaggagaccaggtagaagatgtggtgagggtgggcgggagatggatgaaactgtggatttcgtaggtacagattcatcatccttcatctgtagctacactattgaagaagacctccgaaaaccagaaggtgttttatttgtagttcatttggcaagaaaacttgagtttgacctgaactcatttggtgttgaagcctgacttgaacagctgggactcttttaaagtccttatgtatgtcaggcatccttcataaacatatgtatttactgcagggctattaatgtgtttgattaggggaaattgccctggatcttgctgttttttgttttcactgtaatatatgacttgtgctatataacttttctcaaatgggaagagttctggttcagcagcacctctggccctagggttttggaaaagaggttgtgaaactctttgacatgtgtttacaggataaggttgatgaaactgactgataagaaatggaggcaagatctatggaagaaaagaacatttctggaaagactcaaaagttaatgatgacactgcctcattaacactgaagggaagtagaactttaggaggggtcagaaatattcattagataggcatgattcattgaaaaggatgcatcttgaatttttgaagtattgcttgtatgtgatcttggattgaattgtagaccagaaaaagggggcaattgcagaaatttgaaaaagacctatagattagttcatagatttgcatctatgtgaattgtctggttttcatcattgtactctggttatgtaagatggtaatatttgaggaagttggatgaagggaacatgagaactctgtgtactcttttcttttttttttaaccacttcttttataagtctaaaattatttcaagataaaactttgaaaaataagaaaaagaggtgtttgtcatatcagggaacagtatcattcatgatgcttttaggtagagagtatctatgagcagaagtctagttttctaggagaattcaaagtctagaagtgcaaatcgagtagaatttcagtcaggccttcaccccctcccaattttttctttttaaaaaagctgacctggtttctattgtaagattatctttttatattctgatctgagaaaaatgcttgactgtagcgtaatcatataaagaagagttctaggccaggcgtggtggctcacgcctataatcccaggactttgggaggccaaggtggacagatcgcttgaggtcaggagtttgagaccagcctgaccaacaaggtgaaagccgtctctactagaaatataaaaattagccgggcatggtggtgcccacccataatcccagctactcgggaggctgtggcaggtgaattgctggaatctgggaggcggaggttgcagtgagctgagatcacaccactgcactccagcctgggcgacataacaagactgcgactgcgtctcaagagaaaaaaaaagaagagttataaaatggagagctcatgggaagtgccataacttgtcctttgcatttagtctccctggtgttggagggtgtggtttggctctagttcttgttggtagctctgcagggcgaggtatagttgtattagttaggactgacagttataatatgatgttcaaagccaagaaggtttacagataacagggaagaatgaagaagatgtgtacccttcatggccaaggtcagcttgcctggattttgtggggctgatgctgctgggtgtatatttcctccgtggagagaggattagtttctgaattcctttgcttccctctctaacttcaacattacctcctgtagtttcagctaatttgttctgtaattctctctccactccaattctttctttccttttttgatgagagtagacctaggctggcagccagttgctattgagctataatagagctagtggtatgaacaaaatttgattactgctgtcaacactagattgaataagaaagcgcataccctagacagatacttgcaacataaatggtctattgatttcacaagaactagaaaatgaggccaccgtgtaatctagcagaagaatggatctgtgaatagagtgggtcctgacattgcacaacagttttcaaaagcgcccccctattgatctttttagaagaatcttcagataaactgattttagcttctgattttcctcaccatcaagtgtttacagaaacttcaatgaagcctttgcacttgtgtgtgttcaatggtttgcttttcctacatagaatctagtttggaagttatattggctgttacagaccttgtttgctcctgagctatcatgatatttccacttagcttaatatgaatgttttagaagtttcccactatggaaagttctatttgacatatgaaagttcaacggtcaatttcatagtcagctccacggcaagaaataaataagacaatggattacagagtatagccttgggacatgggaaattttttagaagatggatgagtcatattattaatacatgttgcaaggcccaaggccttacatcaaaaaataaggaaaaaagtttttattttttaaagttaatagccttctgatattttctttgttgtactttgtatagtttttgttctgtttagttttggggggatcaaaaaataaatcctaagatagaatgttttaggaaaaaggtaattaacatcattgtacatgaatttgctcaaacacagtaaggtctgaaaaaaaaagatctctttgatgttgatttgtttgaataattactattctcccagtactgcacttttgagagggaaggagaaattgttgctagtgtctaaattttaacttgtcttccttggctaccttcaaaatttgagatccttaatcttaaatcacatctggtctaacaattcttcctataaacagttatgactatttactgacaaaaggctgcttttattgtgcctgtttctatttcagaggaagacacataaagacaggtggaaagaactgatttgtaaagattgaaatgtcatatttacattcagaatttcatttccttaccagttttcagaagaaccctttggtagaggaagcagggccaacttctttcacagcctcttactatagatagaagtatgaaggccagcaatatttagctggtatgaacccatacagctgtaccaggaacaatgttgaaagtctttgattcctattggaaaatagccactgttaaagatggacaccttcaggacctcacttcagcattgtagccagtatccgttctgactaggtggtgcccacgcctcactggctgttctgtattttgaatatttagtcctgattctagaaatgacatttttgggctatggataaaagatgggtttcgatagccattaaggaaatgcaaatcaaaccacagtgaaatgtcacttcatacccagcaggatggcaataataaaaaagacaaataataacaaatattggtgaggatgtggagaaatgggtatccacatacactgctagtgggaatgtaaaaggatgcaactttggaaagctgtctggcagttcttccaaaggttaagcatagggttgccatatgactcagcaattctacttctgggtacacacatacacacacacacacacacacacacacacacacccgccacacccaagagacatgaaaatgtatgcccacatcaaaaacgtgtacacaaatgctcatagcagaattattgatattagctgaaagataaaaacaacccaaatgttcatgaactgataaatacataataaaatatggtctatcaatacaatggaatattttaaaaataaatgaaatacccatacataatacaacatgcatggacttcaaaagcattatgctaagtgaaataagctagtcacaaaaaaccatatactgtatgatttcttttatatgaaatgtacagaataggtaactctatagagactggaagtagattttagtggttgccttgggctaagggatgggggtcgattgtggtgatggttgtagaattctttgacaatactaaaaatcattaaattatacagtgtaaatgagctaattgtataatatatgaattatatatcaataaagtttgatgcaaaaaaagatcaatgggtattgactatgggacatcatctgtatcactgtgcttttcccggtctccctccctgtgacagtcctagaagacaggtgaagtcagcccgtccattttacagatttggagactgaggcttagagagagagagagagtattttgccagagtcatacagctactagtctaaggaaaatgcagagatgaggaggaggagcataggggaggtactgttagtttctcttttctgtatcatagtacagtagcaggatgagagacacctttgaattcaaacctgtgtgtatcctgacaaagatacatattctatgaaaagtctttgctaataagtagaagatttctatttcacaacaagcaagaaaaagaatgagagaaggactagaaagtagatgtgatcatatgaataatgattttccttgctttttgcatgtatgtggtggacacatgcagaagtgacagcaggagttcgagaccagcctgaccaacatggtgaaatcccgtctctactaaacacacacacacacacacacacacacacacacacacacacacacacaatagccgggcatggtggtgggcacctgtaatcccagctacttgggaggctgaggcacaagaatgacttgaacccaggaggcggaggttgcagtgagctgagatcatgccattgcactccagcctgggtgacgagtgaaaaaaaaataatgataataaagagagcaaggtgaccacaaaagagaataggctggaaaaatttgtctaaatggtggcctcttctcttatagctgcatatggttaagtttattttttccctagtagcgaattctaagggatgaagaagaaatccttttcagttttacttccccaaggtgtgtataactactatagtgaaataataagtccaatttattctttgaagtatagttaatatgtaacgaaactcctaaggccagttgtatacccagggcaaacgccttctaacatctttatttatctacgcagtgggtagggaggtgggtggagtgccccttcccagctgatactgtcaaaacaggaagcaaagttataatctctgtcataggaacatgaatagaggcccttagttgtgactattaaaaaaacaaaaaacctgcctaaggagttttcactgactacaaagtgtaacttcctctctggtgtttagaggaggtggggttaggtttagtcagatcctctcatgggaaaaataaaagccaccaaaaaaaaaaaaaaaaaaaacccaaaataacacaggacatcccagtgtgcagttcgaaggctgcttttgttgtccacttcctccacatctttttcctcatcatctaagcagatgtaggtgatgagcggcctggcagccaccacgtttcattggaaaaagtgcagattggatttgccagggcatgtagctctccaggcttgcaagcgattaccaggtaagtttgtcaacttgcacgactcccagccagtgaggttttcttaagaaacgtctatgaagacagggttctttcattcagttttgttaagtaacaaagcttaggaccaggctggtgacgggaacagacagcctgtctttcctgctgccacgtctgttgtggaccctcaagagtagagaccaacgctgtctgcttcacacttctcttcaggaagtgataattcaccagagttattagtttctttggaagaagccttccaggatccctatatttgtggtagcaaatatgcttcactttacctccctgtattttcaaaatagcttactctgtgctgtttactgccatctagagaagaagcctcctttgtggtgttgagtattggtagacctcatcccatattgtatttgatttactctgttggctaaaaaggcattttacttcttgaaatatttagttttgacctgagaaaggggagaataaaacgtttgtactttgggggacagtatgagtgctggggtttctgtttcagtgcaggcttgtctatgagacatgcatatgcataacttcatgcagggaaagtgtcgtgcacttttctctcgctgaagtttacttccggggtgacttagtttttctgatcagtttagatgttcatatcttgtttaatgtatacatgtgtgtactggttgtatgagcttttggaggggaaaaaccccaagtgatgtgttttattcgatcatacatatcatgcatgaatgttgtcactatgaaaaaactttgagactggttggttttctttttcaatgttttcctttcttgtggaattactctttccctcttaatgttttccttcttagcttcagtgaatgaggtggtaaggggttgtagcgttgtctctgcagagcaaattcaaaccaaaatgattggagcagcccatattttcttagtgaattgggtttcttgaacaagtggcataggagactggtgtgctacaattctcatcattaactgttacttctttcttaaataaccatgtgatcccaacacaacatcaaaatacctctcagggacctgaattaaaactccacgcgggccaggcacaatggctcatacctgtaatccaagcactttgggaggctgcggcatgaggatcacttgaggcctggagttcgagaccactctgggcaacacagggagattccatctctacaaaaaatttaaaaatcagccaggcatggtggcatgtgcctgtggtcccagctacttaggagactgaggtgggaggatagcttgaacctaggagtttgagactagtgagccacgatcatgccgctgcattccagtttggacaacagagggataccttgtctcaaaaacctgcataggggcagcaattgcaggcttgtggcctttcgaagatttcctttgattgtcactaaatcctctctctttccccaccattaagagtctctgtggtcagctagtcttcatcaaagggtcttgctacaaagggtctagggtaaccttaatgattgaaatcagaagacagctagaagaaaagtacaaacaaacctttaaataataagcaggctttggccgggggcggtggctcacgcctgtaatcccagcactttaggaggccaaggcaggcggatcacctgaggtcaggagttctagaccagcctggccaacatggtaaaaccttgtctctactaaaaatacaaaaattagtcgggcgtggtggcacgtgcctgtaatcccagctacttgggaggctgaggcaggagaatcacttgaacctgggaggtggaggttgcagtgagccaagatcacaccattgcactccagcctgggtgaaagagcaaaactctgtctcaaaaaaaaaaaaaataaaataaaaaagcaggcttttaaatgagtagctacagtgttaaatatatttaaatgctgtgctggttgagttctggttcatttagataacattctttcctgccctatgaccaatcaaaaggctttaggaaaatagcatttttaaaattaaaatgtatttcagtgcatgttattttaataaaaatagaaaaccaatgtgtacatgatttccaatttcacaagggcctagattctcctctcatcagttgctattgaactgatttttttgtgtgtgtccatagtgtaggctctttagtcatcttgttagaaataaggacattaaatttaatgttaaaaataatattttcagccaggcacaatggctcatgcttgtaatcccagcactttgggagcccgaggcgggcagatcacctgaggtcaggagttcaggccaggagcctggccaatgtggtgaaacatcgtctctactaaaaatacaaaaattagctgggtgtggtggtgggtgcctgaaatcccagctacttgggaggctgaggcaagagaatcgcttgaacccgggaggcgggggttgcagtgagctgagattgcgccactgcacttcagcccgggcatcagggcgagactctgtttaaaaaaaaaatagatctctatctctatcactatctctctgtctatctatgtatcatctatctatctatctatctatctatctatcatctatctatctatcgatctctatctttatccagctgtatcatcattttcactagatgctaacaataatataactgagataaaccaaagtttcaaaacaagcttgaaaatgtgaaatgaataatttggaggcgggactggccatttaggcatctatgaaggcccagatgactcatgtctggaaattgccactgctcaggaaaccactcctgggagccctgctcgttttgccatccttcctgctttcttgcctgctgacaggactctatgtcagctgtttcctttttagatggaagggttaaaagattcactacttgggtcccccattagaatcaccaacatgcttgtgccccacagtcagagatcgtgacttgattggactgaggccctgctctgtagcttgtcaaaagccagccaagggtgtccaatgtggagggtacaggggaatgtattcgtcccccactagactgaaagctccatgggagggagtagaggcagctttgttactgctgcctcctagcacctgaatgtgtgcctgatgtgcagaagaggctcagtagctgcttgtggaatgaatgaatgaattagttcctttgagtaacaggaagttggaagaagattggacagaggcttagttatggtctttgctgatgtaggagagtgtgctatgttaggctgaacagtggctgtcatcttggaagacactccaggaaaaggtcacaggggaacaggtggctgatctgggggaatgctgaacagacctctcagaagagacaaggctccagggcagtggtgtccttatgaggcaaggcaggttgagaactttgggaaagagaatttcatcaggggctgagtgtgtgtgtgtgaatgtggatgtgaggccagatggggacactcctgggagaatctcctgaactgtggcttattctttgttttttttttttgtttttttttttgagactaagtctcgctgtgttgcccagcctggagtgcagtgacacagtcttagctcactgtagccttgacctcccaggctcaagtgatcctcccacctcagtctcctgagtagctgggactataggtatgtgctcccatacctggctaatttttaatagtttttctgtagagatgggatctcactatgttgcccaggctggtcttgaactcctgagctcgagtgatcctccctcttggcctcccaaaatgctgggattacaggcctgagccaccatgcccagccgtgactcactcttaaaggagctcaagtcttttgtgttggaactccaggaggttgacgaccacactcatctattcagtcagcatttgctaggtacctagcacacgcccagctctggggaggtatggggatataaaaatgaaggtgatttgattcttcccccgtggaggttaggacctggaaaggatggtgtgtgaagtgaatgctaggtttgctggtggctgaaaggaaggaacgttgtcatctttgtcatatgttagggattgccagacccaccagttgactatatccaaataaaggaacacagaatttggagtgatcacagggcagtgagatttgtctgggaagatatcttaggactcgtgaattttttgcagatcttaataattatagagaaaatgagtaggtggttaggaagaccaggtaactataacttacagaggtgagagaatgagaattgttaagttgggagaaaaagagtagaaagagcgacatgtgaaagaaaagaatcggccggtgcggtggctcatgcctgtaatcccagcactttgggaggccgaggcgggcagatcacctgaagtcgggagttcaagaccagcctgaccaacatggagaaaccctgtctctattaaaaatacaaaatgagccgggcctagtggcgcatgcctgtaaacccagctactagggaggctgaggcaggagaattgcttgaacctaggaggcagaggttgtggtgagcagaggttgcgccattgcactctagcctgggcaacaagagcgaaactccatctcaaaaaaaaacaaaaacaaaagaaaagaatcttgggtggagaaaatgagaaatgggattaacatggtactgagcagttcttttttttttgttttgagacggagtctcgctctgtcgcccaggctggagcgcgtgatgggatctcggctcactgcaagctcctcctcccgggttcacgccattctcctgcctcagccttccgagtagctgggactacaggcgcccgccatcacgcccggctaattttttgtatttttagtagagacggggtttccccgtgttagccaggatggtctggatctcctgacctcgtgatccgcccgcctcagcctcccaaagtgctgggattacaggcatgagccacggcgcctggccctgagcagttctttaagggatgagacttggccctcaagatctgggtttccattacccctgccatcgtcagggtaagtcactgaacctctgagaaggggactcccaaccaggaggatcacaggatctcccaaccagggaggatgccccgggagagtgtggtcaggattcatgatgttacacattttaaagttctttgcaagctatagtaatagttccaggtaaataaatggaataataaattctgtaaaaattataaaaacctagtctgttgataatgggctcttttaggtagagtctagggtaggaaatcaaacattatattcatcatggtacttgaaatatatttaagctgaagctgtgcactccatcatgtttttgatatatttttccttggcattacttgaaaggcatgctcatgaaactggatttggatctgtttcatgttttcacttgcgttctctgacccctacttagagggcaccaggtgcttcctattctaaccgtttgcaaattcaagacttggttggagggccattcaggggactggtgtggggttagataggatctggacacagcgactccctcgctcctgctccagtattttgaccttaatttgaacagttcaatgaactggcaactgaagtcgttttttcccactgaactagacctttcattgttttgcagaggaagatgactcatagccaggttctaccattgtgctaaagtgaaattttagtctaggactaaaggaacacaggccaaactttctgtctgagctgcagagtattgaaacttagattgtgagctgggcaggaattcctgtggccctctgtgtggagttgctctcaaggaaaaggagcatttaaatacgtttttgactccaaatttaatttttagtaatatagttcaaatgtcctttaaaatatcttaagtaatcagactgttttctaaaaaaaaaaaaaatgtaatgcaaaatgaaaattctacaaagtagaaaactgtcatttccttcctctctccaaaaccattgttaatagtttcgtttcttctgctacccttgttttctatgaatgtaaaaatgtatgcctctatgggtgagcatggcttttcttttttgaaccaaaattgaaaccatcctgatttagtggcatcccacttaaaacattattaaaaactacctgtgtacatgtatcttcgcttacttgggcaattgctggggcaaatatgcttttactgttaaatcgtcatctacaacagatgacatgtagagagatgaaatgtagtctatagttgtttgaacttgcatttctttttttgtggaactgaacttctctgcatatgtttattggctctttggacaaattcgtcagtgatttggcttttcatgcattgctcattttcttttgttgcttggatccctgacttttatactcttaatgattccaagggaaattcctacaaaatggcagatttgggaggacttatttgaatttcttttgagttctaaaatggttaactgctaccttaaaagatagatattattttcagatatctaggacagaggtttgagtctttggacttagattctatagtattttctttctttttttggctgatatggaagacgtcatcatcccaaactgtgctgagactagtagttatttagatacactattttattacattttcgtatactgataaattatttccatatggatggtaagtcccagatttatttatgaaaaaaaccattttttatatattttatggaacatggagttagcagaaagatgctgtggagttaggcttaaaattaagccctaactattctgcctcctgttttggggctgttgtcagtctttaaaggtacatctttgtaaaattttttgaacataacttgacagattgcaagaaggattataataaatggtgtctgtttgtgttagagtatttcaagtcagtacaggaaaaaatacatttagatgctaagtgaagataagacattagtttaaatgaggccccgtatgcaccatcatattgaaaatttaccagtgtgtcctcgtccttcaatttagattcgttagtgatttttcacatcaaagcattgaagctgtaattctatgttgggttcatttaaccacagatccagtaaatggcaggaaatagagagctatacaggacagcaaatggcctgcagttgtgtggaggatatctttgtggcaagatgccccagatgttttgctgttttcaaagtttgctatcatttgttcagaaaggttttcattgcttgcaagcaagcaggcaagcaaaggaaaagggcacgcagccgcctcccctatgattctgtgctctttgcctttgatgccttatataaaaagctttatttagtctgcagagaggttatttctccaaatagaggtgaactgtcatagtagtctggaaacgtgatagatttcagttgaatgccgctgatccaaatactctgaaaggctgggctgtgtggcacttgtaagataggcaccttgcacagattcttccaggtcacttgcacatatcgccagtagaaatacctcatcagatagcgatccacttggcactctgagaagcaactcctatcacaccgacactgctacttttctcctggctcagccagtctcttgctgggaacctgctgccagagttagtcacttggcttctgccctggcctattttcttgttgacttctggattctgtgcctttagcttctccttggactcattggccattactctctttctggtgttagtagctcctagactgtgtttgacagaagaaatttattcccctagcaaattcactttctactgaggtaactctaacccacccatgcaatctagcatctgccaatactctgagacccactgattgttaatcagtatttattatctaactctgagtaacgagtgttatagcaggaaaagtagaatcttttttgtgtgtgtacgaatgtggtttaagggacttttggggatagaggagaaataaacaccttgaaatgaattattatattttacctttgcccatgtgaattctttaaaataattattaaattctcactttgcttatatgcattaaaaatttcatagtgatggtatttaaagagggaggttatggacattttgcaagttggttgaggcaatagttctcatttcccttttcatgtcccacgggacatgtcatatctgtctgcctccctcctatgcatttctcctgctgttgcaaggagaatcttatgttttatgatgaaaatttatttggtgactaagtgaagtgtgcactattcttttaaaaagtccttgagattgcattctgtatatttgctgaatttgttactaggccttacgctgcaacatttctgagtaatcaaatctaaataaaaataaaaggtcgttcaaggtaaatctatgtcttgattactgaaataaagtattgacatttatttcccataatttgggaagttattcagtaaataatatttgcctggtgttttataatgaatcatttttatcatattgggtttgtgttaggaagactgtcagcattgattttccagtagttttctaaattttctcatctatttatgtttcttcttcttctttttctttttttctttgagacagggtcttgctctgtcaaccaagctagagtgtaatggcatgagctaggttcactgtagcctcgatctccgggggtcaagcagtcctcccacctcagcctcctgagtagctgggattacaggcatgtgccaccacgctcagctcatttttcggattttttttttatttgggtaagagtctcgctctgttgcccaggctggagtgcagtggtgcgatctcagctcactgcaacctccccttcccaggttcaagcgattcccttacctcagcctcccgagtagctgggactacaggcgcatgctaccatgcctggctaattttttgtatttttagtagagatggggtttcaccgtgttagccaggaacgtcttgatctcctgaccttgtggtccacctgcctctgcctcccaaagtgctgggattttaggcgtgaaccaacgtgcccggcccttctgatttttttttttttttttaaatagaaacaaggtctcactattcccaggttagggtcttgaacttctgggcccaagtaatccttctgccttggcctcccaaagtgctgggataacaggcgtgagccactgtgcctggctatttatgtttcctaattactgcagtgctcatgtttctgtcagcttcaactatgccacacatgactaggaattagaaataagaaaacagtaaccagcctggccaacatggcaaaaccctgtctctactaaaaatacaaaaattagctgggtgtggtggtgagtgcctgtaatctcaactacttgggaggctgagggacgagaatcgcttgaacctgggagtcggaggttgcaatgagctgagatactgccattaaactccagcctgggcaacagagcgagactgtctaaaacaaacaaacaaacacacacaaaaacaaaaacaaaaaaaccaaggagccaaaaataaatgactcagtgaacatttattgagcaactgtggtttgctgggtgctgcggtcgttgttgtgaaggtgctgggatgttttaaagttggttttaaacttaaggattctacttactggcagcctagaaccactgcatatgccttgcagagatgatgatggacacttgtgtcctcacctgtgcagtgcaggcacatcagtgaagagccttagattctcattttgcaactgttttcacacttgggtatcggtttctagatctaaagcagtaaatgagaaaggcagtgggtgtgaatgctgctataaactgacaccctgacaataacgatatgcttgttgacaggctgattgcagaggagatgaaaaaataaagggcagaacaaaaaagtctcaaagctctgccccctgcgtcagtaggaagctgtattttgctactcaagtagactaacattggagaaataattagcaagtgaaaaagttcttccaccgaaaggacaatgcaagttaaggcaggtagtctggttttctgtgctgcagcatccaaccacgttctagaatcctgttttcatattttgttggacccaactggattaaaacaaagcccctttctctggctgggtagtggcccgagttaggcagtttccagtgctctaattggtactttggagccagtgtccagtgactttcagaagcagggtaaatgttcttggtattgagcagttctctgctggatgccgggcctgtcctcatggttcatgctgcccttagatcatcagccattcactcctatggtcggtcaaggacaccttctctaggaattctctgctgacttccaagtgtgggttgggtgcccctcttctctgctttctccttccctgcttggattaaattcagagattctaagatgtcttcatctgtcacaacattcatgatggatgttacccatcagtgtttttgaaaacgaggtctatctctgcacggtgttgaaagataggtggaacttatcttttaataatctcttcaggtggtcattgtgtatgtttgagaacctctcctttagaccatgagcctgaagaaagtcctgttcttgtctttgaatctttaaaccttccctagctcctggcacgttttttagttgctcagattttttgttgtagttcagtgaatgaggtagaattctggtaatttttttgttgttgttcggtgaatgagatataattcctgttaaaaaatgtgtggaaagcaggtatgcctatggaatccaaatccagcaatgtgatcaaaagccgcttgaaggattttcgaacatttttcatttctttcttttttttgagacagagtctctgtcaccttggctggagtgtagtggtccaatctcggctcactgcaacctgggctcaagggatcctcctacctcagcctccagagtagcagggactaaaggcatgcaccaccatgtcccactagtttttgtatttttggtagagatggggactccctatgcttctcaggttggtcttgaactcctgggctcaagtgatatacctgcctctgcttcccaaagtgctgggactataggcgttagccaccatgcctggcccattttttcttattgttttgtaaatcaacattatgtgaaacctaaaatttaatatggatatacaaaaatagcttttttattttcttgcccaagaaaataaactgtatctttattatttatatttttgccgttttgaaataagccttttattttagaataattttacatttatagaaaagttgcaaagatggtatgtaaagttccccagttaccactttttgccactgttacccagttttccccactgttaacatcttgttacccagttttccccactgttaacatcttacattactatgttacgttgatcacacttagtgaactgatatcaggattgttattattaaaggctttaagagttattgttgaagatttataaatttatagatgaaataatatttagaacataccaaattttgaattagaaatattttaaaatttgaattctttgattttaagaattaaaacttttgaattcttatatgtagtcatagttgggaatatatccacaaagcaagtagaccaattcttgtgagaatgattctgaaacaggtttttcagttgtcattagccttctggaacctcaaaagggggaaggttactttcaaaggctaacattcatttaatctatctgtagtactccatatgaatgacaatcattacttatcgacatctcaggttttgttagatatgatatttgttttaattatttatggtatattcaggcagaggtgctattcaaaatatttaacaggttggcataggcctcaaccacccagactgctgttcaagtaatcagaagggatgctggctggtgaatgtgtcagtcctattaactgacacatttctattaatgtctaaaatgtcctaaaaatgtctccagatattgccagatgtctcgtaggtggcaaaatcacttctggttgagaactcctgatataaagcagttagaacaggctggcactgctctagtaactgctttctaaatattcactattattattgttgttggtatctttcatttgttatttctgataacttttaaacatacactgcttagccccagcactttgggacgtttaggtgggtggatcacttgaggtcaggagttcgagactagcctggctaacatggtgaaaccccatttgtactaaaattacaaaaattagttgggtgtggtggcgaatgcctgtaatcccagctacttgggaggctgaggcaggagaatcacttgaatctgggaggtggaggcagaggcggaggctgcagtgagctgagattgcaccactgcattctgtcttgggcgacagagcaagactccgtctaaaatatgaataaataaataaatatatgtgtgtgtgtgtatgtgtgtgtatatatacatatgtgtgtgtatatatacacacacacatactgtttatcaagacatattaggatttctttatagttaaatcaccacatgcataaaaaataaagttacatttttttgtaagatttactcagaatttgttggagacccatagcctgttgtaggaagaaatgtaagttctatttttgagggagattttcagccttttttacttgccctcacctgccatgttcctgacactgcagcctcgagaaaggtttgagactgttggagcacatgggtgtggaatttgtagaccacttgttcttccagacttcctcacacccacccatagcctgcttttagttgatagtggctcagcaagggtaggagcctgtactttggctcataccaaattcccctcatttccgcacgatgatatgttattagtattctgatccctgttatttgttaagttaagctgtgcttcaggaatctcagaagatcacagcattttgttttcagtgacttcatttcataatatatgctctgggcaggtgagactagacttagagacattgaagcccaacaatttaatatccacaaatagtgttttatttgtagtcttcctatcctttcctcttcggtgttctagaaacagatgcttacattgtgtaaacactccttctgttactgattctatggtatccattttcctattaacaggatgaagattttgttttttcatcctcaagtctacaagaacggaatagtcagtgggatatgaggatcagataaaaatccccccactttagaatcactgatcttagtacttcctgcagaaactctgacagccttattttttttcctcctttgaatccacgtaggtgtttttgggaaacatttatttgctgatattggttggtaataataattgttatttttatttcaaataagatgctgctggtaaaattattgtgaagtctactcaacttagtaaacttatatcaaaagccaggttttacatctggtagaacagagatagtcaattccttgctgtagggagaggaagggtaggagcctgtggctccctccccgccatcttgtccccaaccattcttatacactagtttgattcaagcacttgagctttggagccagactgcctgaatttggattcagctacttttacctgggcaaactgcttaactttaaatgtctgtgctctttgctgaaaaatgtggacaatagaagcatctatcttatatggatattgtgggtattagactatatggtagtccatttaagaaacgttcagtaaatgttgctcatagtaacagcaataatgttactactcctaatatgactgctacttttgataaatttagaataacagtttaaattaccatatatattaaaactatgtgacagtctaaattatcttaacagttgaaataccataacagtgtgtatacacacacacatacatacacacacactttgtataatggagctgctaaaatgaatcaggtttagctgaattgaaatttgattctttttgcctatttgctataggtgatagtgagccatgaaataagtaaaatacagaaggaggtagatacaacatttagattttttagccttacgtgaaacagttatggcttcagaatttaaagcaccaacatttggtggggtcccatggaaatttttattcctaatttcttaatattaaccatcttcttcatattctattaactcttgtgttgtttaaaaaacattccagtattctttctttctttagttttttgagatgggggtctcactatgttacccaggaaggccttgaactcctgggctcaagtgatcctcccacttcagtctcctcagaagaagattccagtattcttatcttcattgttgagtgctttttcttttaaaaattgcaataacattttaaaaattagaaaagaaagaagcatccatttctatttctaccatattaatacaacagtaactttcatttgttattttcccatctagtctttatactcatacttaaaaataattggaattatgtaatatttctaattttagttctggtgttttcgtttgacattacttcataagcattttccatttttttctgttaggtagttataccatcatttatttaatggttttcctgtttttgtttttagtttacttctagtttcaacattatggataatagtacagcgaaaattatctttattgatctgtaaaatggagataatacaagtactccagggctgttgtaaggattatatgaggggatagatataaggcaggtttgtccaccgtgagacagttccattttgctgtggaagctgtcctgtgctttggggatgctggacagcatacctggccgcttttccccagtggtgacaaacaaaaatgtctccagacattgccaggtgtcttgcaggggcaaaaccactcccagctgagaacccctgatataagtcagtagaacagcctggcactgatctgatgagtgcagtgtaaatacttgctactattattattgttgttggcaccatccttcatttcaggtattcatttctgataaattcccagaaatagaatttatgggatgagaggttagttttagggtttctgatacgcccttcagaggactgtaacacgtttaacgtcatcagtttatacaaatatgccagtatctctgaggcccagccagtattgaattgtgagtacccaaaatactgttttgtcttcaatttctgtaattactagccatgatgagcatctattatattttttttatttgcattgccacatttgaagattctggtaaaaacctttgtctacgcatcgttttttttttttttcttttttagttactctgccattcaacagttaaagttgaaattcatccctcagtagctaagcctgtattacatttcatcgcttgatgtttaacagcctctgagtagaacattgattgagatccttttggattattgtgtttttcccagtgttgctgcataatatgaaaccttccaaaatttgaatataaggataattttgtggaaaagaattcaactttgtattcagtgatatatgtcctgtaacagaaatgattgcctctggtttcagtacccttttatttctcttttcttttcttttttcccttcccttcccttcccttcccttcccttcccttcccttcccttcccttcccttccctcccctcccctcccctccccccttccttccttccttcttttttcctttcctctcttttctctctttcctttcttttctttccttcttcctttcttcctttctttgtgtctcacttggtcacccaggctggagtgcagtggcatgatcttggctcaatgcaaccttcacctcacgggttcaagggattctcctgcctcagcctcccgagtagctgggattacaggtgcctgccaccatgcctggcgaatttttatatttttagtagaaacggggtttcaccatgttggccaggctggtctcaaactcctgacctcaagtgatccatccaccttagcctctcaaggtgctgggattacaggcttgagccactgcaccagacctggtttaagtacccttttggagataaccccaatcctagctgtagcagaggctgctattgaccccactccctgctgtcagtacttctggtgcactgggacttccagctgcccacaccggcatgcctttgcctgagggcattctctggctggaaagttcacactcagggctggcaggaagtgtcagcgcccagcaacccatagccagtgactgctgctgtagtataaattctccagctctcttgcatctcaggtcgcctacttttgagatgaacattttacactgcatctccaagttcccagttgggttgtgatcgaatggtaacttgcttgataatgacctttttattattggccacctttccttctttgtctcctttctctactccctagcagtgtttcctgggatcacttctgaaataaactacttatatttgaatccttgtctcagggtctgcttcttgggggaaggaccaaactaagatattattagccaacttttcttttgactttgattgatgaaagaagaggaaagatcagaccaggagaacagaaatattttgaagacctttctgtataaaaagtaatgaatttaacttcaccgattcaagagacaggacagtaaatattcttgttatgctgcttcccagggtgtcctaagaaagagtcttcagattgtactatgggattaaagccatggcagatggcacttaatgtccctgactaatgtgactttccacccactttctttacaccatagtttgactcaggggcttgctggatttcagaaagactagcttgtagtttgtggctaaaaagactggctgatgttaggaagggggagaaacaccttatgtgttgctctactaattttgtccttgattttgagctaattattaatgctccagggaaaaattttagcttggcaggcagggaaatattagtttcaattgtgagcttaatccagagggctatgtttgagttaaaaccatccaggagtcttccagggaagtccagaatcttccagggaagaccaggtggatctatttctggatgctaaaaggggcattgcggggctgataaggaaataagtcccttgttctttaaaaaaaaattatttatttatttatcttttttagagacagtgtctcactctgttacccaggctggagtgcaatggcatgaccatggctcatgcagcctcaaccttctgggttcaagtgatcctccctcctcagtttcccaagtagctgggaccacaggtgtctgaaaccacacctggctaattttctttctttctttcttttttttttttttgtagagatggggtctcgctatgttgcccaggctggtcttgaactcctgggcttaagtgatcctcctactttggtctcctaaaagtgctgagattacagatgtgagacacctcacccagccagaactgcctgtttcattagagagacacaagtcaattcctggaatttttttttcctttttgctgccactttcttacttaaaagaataaaaatcaaagccaaattcatcatagtaatcataataatggcaacaacaacaaaaaaaggagtaaaatagagttgtgaatgtttgctttgttattaaacatatcaactcattggagctgatttatataaagttaaatcctgctagaatagctggattccttcctacatgggtggggtgggaatgctgagatcctggtgtgggcattccatgccagggtagaaatttcctgctcaggcacttagtgaaggagccaactgagggaggataggtgatgtgcccgcccatccggtggcacccagtgacctgtgcacaccaccccccatctgcccaggacccagccatgttgttcattgtacccttttcagactgctgacctccaggagcacttgtcttaaagtcacatagctgtatttttcctctccagaaaaattttgaatgtattttctaaatagctgaggtcattgcatggtcttcagtgaacttagctacaagtgaatgtgacctggagtgacccagagtgagtgctggccagcataggtttcacattttctgtgtgaaagttcttcttttgttgtttgtgattaataactggatgggatataaagccaaatgatttcattgttgaacacagacttgaaggtcatgagaaactgcctgttcaaattacactttgccaagacatggaaaaaggtctgcatcaacacctgaatagttttagaaatacggtagagaaggaaaaaaatgacatgccacttgttatgtgatgtgaaagttgatttccacgcgatgcaatatcttgggtccttacaacatctgacctatgaggctgatgagtttgcactgagtcaggactttaaaacaaaggtgtattgaggacctactgtgtgccaggtcatttagaatgagtttttatgctaagtaatgtgttatatttatgcttattttgttaagtgctcagtttctcttaggttttgtattatgtgggtttgctattttttaaaaaaatatttttaattttttgggtatggtttgctatttgaaatatgattttgaataagtttctcagtacatagcacttttaattttatgtttttaaaagattttttaatggttatacataataattgatggacacacaatagtatttaaatctaaaaatagagaaaccatggcacacaaaacacagtatcttacagaactgtattatttgcttcttttctatgtgttttctaggcttttgagtcagatgttaggaaagagtctgtccatctttaattttctcacttcgagaagcactgaaatatttctatacatatgtccattggtatagcgacctaacacaactttaaaatcattttgaaattgacgcacagagagcttggttttccagaactggtgaggtgtaagatggttgaggactgacttggcctggtcggacctgtttctttgtagcattattactatttgtttattttccacctgggccttacatcttccctctcaagacagcgtctaggtcccaactcagttggtaggaatttgtgcagtagcaaacctgcagatgggcagagatacaaactcactcaactcacattacagtctttccctgtctaaaacaaacaagaaaacaaaacaaaaaagggagagatcatataggcgtgtatatatacaatattttgttatagataaggaacaaagtaccatatgaattcaaaaggtgagggtgggatgggtttagagctgggagagaaaccatctaaagccttcatgaaagggggtaccatttgctgtggatactgatggcaatgttggggctggaggaaaatgttccaggtagagggcacagaattaatagggggtagctataaaaagcatgctgaataccatgctaggtaggcatttagccctgtagcatatagatgtatctgaatttaaaggcagtgggtgatgttcggaggtttggagcataagatattttgtgatcagaagaaggtgaatctgtcagaggtgtttaggaagcaaatacaagggtagatagtatgggaggttattgtagtaccttgagagaatgctattgaggacctggatgttgaggttggtagcctgggaatatctgggctctgttgatgaattaaattgagttatggcaaagctctcttcgtggatttcaatatttgcgattccactgcttaaagctgagctcactcttcttttcggtgtaactgtgatggaaggaacttgcgtgtgagagtctccctcttgttgggtctgtgctattggtttgttgattaggaactcaattggtacctgcagaaattgcctctgattgggacctgcttctccccactgtctcccttatgtttccccctgagaggtaaaaggagtgatttgggtcaaatgtcctttgttttgggttggtttgtgtgggatgactcctggtgtagattttgtgtgtgggtgctaatgtacttatagccagctggggctagaagctcaggcacccacagctttgctctccccacttcgcgtttttacttctgattttctgtttcccaatttgtgattcacaggcagggatgactgactgagaagcgttgcagatgagtccgtgtatttgtttcattttgtgattgtttcaaattagcacaaatttgatggcttaaaacaacacaactttactatcttacatttctgaaggttagaagtctgacacgggtcttactgagctaaaatgaaggtgttgacagggccatgttccttctggaagctccagaggagactcctttccctggtcttttccagcctccacaggctgcccatgtttcttggctcatggctctctttagtcttcaaaaccaacagtggtgggctgagtccttctcatgtggctcgttgctcgctctgctattcaactctcttccttttccacttagaaggccccttgtgatttcactgggcacaccaggctaacccaagataaccttctatcctaaagtcagttgattagcaaacaatactttcatctgcaacctcaatttaccccttgctgtgtaacctaaggtactcacaggacatgggcctcttttgcaagtggagaggaagaagatgtattattctgcttgccacattgcgtagctcttgattttcacttcttttaaaaaagaacatctgcagaaagaattgagagtggtggataattctccaatcattcctgctttctcctgaaataaatttcatgcctttcttttagcagttgatttaataattaattttaaaaataatgttagaagaagcttttcctgttcatgtgtgtgttatgatgcatatgtttgtctgatgaaggggaaaaagggaaggaatgactcaagtactttcaactttagggccagcctaggattggaattctggagtagatcatgaggaggagatggtcaactttcttgtgacaaaagcatgtacataaaccacttaggattctccacttttcacattttattctgaaattgcatgcttcagttaatgtgatttaatggttttctctcagtgtcattggcaggattgttactaagcgacaaacattcaccacagtgttcaaatgtacttgggaagaaaatgagtagccaaactaaaagtgggatttaaataactccaattttatgaaaagtgaagaagttcagagattacttaaggtatttttttggtgatctgtggattcaatgatcatttcgttcatggaaggaagttttatttttatttttttctgagactgagtcttgctctgtcacccaggctggagtgcagtggcgtgatctcggctcactgcaacctccgcctcctgggttcaagtgattctcctgcttcggcctcctgcatagctgggactgcaggcatgtgtcatcacgcctggctaatttttgtatttttagtagagactgggtttcgccatgttggccaggctagtcttgaactcctgacctcaggtgttccacccgtctcggcctcccaaagtgctgggattacaggcgtgagccaccgcacctggcctgggaatttattttcattaacttaaaatattatggcagctgatagagatgtatgtgcatcgcattctatttctgacacaataaacagcgtaatcgtcacatgaatataaaagttgatgtgttaaagcagtacagctcatgtttattcacttgaaagccaggagagtatacccgtgggagatgttgctatcaataaatttttacctatatatattttaactttgattttaagttctggggtacgtgtgcaggtttgttatagaggtaaacttgtgtaataggggtttgttgtactgattatttcatcacccaggtactaggcctaatagccattggttatttttcctgattgtctccttcctcccatcttccagcctctggtaggtcccatgtctgttgttcccctctatgtgtccatgtgttttcatcatttagctgccacttaaatgtgagaacatgcggtatttgatttttcgttcctgtgttagcttgctaaggatgatggccttcagtttcatccatgtttctgcaaataacatgatctcattctattttatggctgcacatattctgtggtgtatatgtaacacattttctttatccagtctaccattgatgggcatttaggttgactccatgtctttactgttgtgaatagtgctgtagtgaacatacacatgcatgtgtcatcatgatggaatgatttatattcctttgggtttatacccagtaatggcatttctgggttgaatggtctttctgttgttaggtctttgaggaattgccacactgcttttcacaatggttggactaatttacactcctaccaacagtgtgtatgtgttgctttttctctgccacttcgccagtgcctattattttttgactttttgataatagccattctgagtgatgtgagatggtatctctacttgcattttttttttgtctctttgttttttgtttagatggactctcgctctgtcatccagactggagtgcagtagcgcaatcttggctcactgcaacctccatctcccgggttcaagtgattctcctgcctcagtgtccagagtagctgggactacaggcgcgtgccatcacacccggctaattttttgtatttttagtagagatggggtttcaccatgttggccaggatggtcttgaactcctgacctcaagtgatctgcctgcctctgcctcccaaagtgctgggattacaggtgtgagccactgtgcccggcccctctacctgcgtttttaataaaggattatacatgagtcaaggatttgttaaaaaaaaaaaaaaatccttccaagataattatacatacattactcagaactgtcactttttttggttaattttacagatgtgaattttattttatagatatgttctttttatgactttcctcaattattatatagacaatgcagttgttgaataatatctaaattatttagaataatagaatattttctattatgcatttctgaaaaactcaagttactgttagaattaagtaaggattttgtcgtagacaaacagatgtagcgatagcatagtaacctactaggttagatactgcctgaatcttttgttcttatatggataaattctacgagcttttatttttcaaggagaaacttatcttcaagaagacagtaatttgttggcggggggcgaccaggagaaaaatcctaagaatgtgaaaacccctatataaggagaagtttctgtttctttctctttttttgagatggagtttcactcttttgcccaggctggagtgcagtagtgcgatctcggctcactccaacctctgccttctggtttcaagtgattctcatgcctcagccttccgagtagctgggattacaggcacccgccaccacgcctggctgatttttgtatttttagtatagatggggtttcaccatgttggccaggccggtatcaaactcctgacctcatgatctgcctgccttggccttctgaagtgctgggattacagccgtgagccactgcaccccgccttctgtttcctttattactgataatccttagtgatctaaagactgagatcctataagcttgttgctactttcccttttcatgtctcataaaaagccatggtacaggctgttgggaattatcacgtggacattgaagataacctaattctggccattgatttcttcagtttctttatcctgcagtgtgtagaagaaagaaaactgtgacatatatcaaaccagaaagacatatgacattaaaggaataacaagcctggcacagagtagatgctcaataaatattttttaaagcaatggaccaaataatttgttggtatatgttaatttgttaatttttatatgctagattccttgttttttggccttaggaaagagaaacatatctttaccattaaggaatatacatgataagcatggctgggtggctcaggcctgtaatcccagcgctttgggaggccgaggtaggcggattgcctgagatcaggagttttagatcagcctgaccaacatgatgaaaccccatctctactttaaaaatgcaaaaattagctgggtgtggtggtgcacgcctgtagtcccagctactcaggaggctgaggcaggagagtcgcttgaacctgggaggaggaggttgcagtgagcccaaatcatgcccttgcactccagcctgggcaactccgtcgcaaaaaaagaaaaaaaaaggattataaatgaataaatgataaggttttttaaagttagggtccgtttagtggcagtttggaaattacagatcaggatctaagagagctctaatgacagttcttttgtgacttacaaggtgtctttttactgtgtttgacttaagggattttgttttgtttggtttatcttttaatttctgttttgacctttcataaaatgagaccttatagaattctcttaagatagtgttcataaactttttttggattgagaggtctttaaaaaaattgatgtggaggttatagaatttctgcctgtgctcaaattcacatatgtgaggacatgcattatttttctcataactttaagaagtttgggaagtcactaaaacttacccagatctgttcattcgttcatttgattcatatttgtttattcatttctatggcttataaggtttgtaggaccatctgacagagtgctacccttagttgttttctttctttttaaatacaatattgtgtagttgtattttaaaagtcaaacatttcatcacataaaaattataacctgggctgggcatggtggctcacgcctgtaatcccagcactttgggaggctgaagtgggcagatcacgaggtcaagagatcgagaccatcctggccaacatggtaaaaccccgtctttactaaaaatacaaaaattagctgattgtggtggcgcgtgcctctagtcccagctactgggaggttgaggcaggagaatcgcttgaacctaggaggttgaggttgcagtgagctgagatcgtgccactgcactccagcctggcaacagagcgagactctgtctcaaaaaagaaaacaaaacagaaaacaaattacaccctactcctagtggggaaccctctgatatggtttggttgtgtccccacacaaatctcatcttgaattgtatctcccataattcccacatgttgtgggaggaaactggtgggaggtaattgaattatgagggcaggtttttcccgtgctattcttgtgatattgaagtctcatgagatctaatggttttataaagggcagttcccctgcacatggtctcttgcctgccaccatgtaagacatgcctttgctcctccttcaccttctgccatgattgcaaggcctccccagccatgtggaactgtgagtccattaaacctctttttctttataaattacccagtcttgggtatttcttcacagcagtatgaaaatggactaatgcaagaaatttgtactggtagagttgggtactgctaattaagatacctgacaatgtggaagtgactttggaactgggtaacaggcagagctttgaagaacttggagggcttcccaggaagatgttaatccccaagacagtggggaaaatggctccagggcatgtcagaggtcttcacggcagcccctcccatcccaagccaggaggtctaggagggaaaaatggtttagtgggccaggcccagggccctgctgctttgtgcagtcctgggacttggtgccctgtgtcccagccatggctacaaggggccaacgtatagctcaggccgttgattcaaagggtgcaagccccaaccctgggaggcttatgcatggtgttggacctgtaggtgcacagaagtcaagaattgaggtttgggaacctccacttagatttcagaggatgtatggaaatgcctggatgtccaggcagaggtgtgttgcaggggcagagccctaatggagaacctctgctagggcagcgtggaagggacacgtgaggtgggagcccccgcacagaattcccactggggaactgcctaatggagctgtgagaagagggccatcatccttcagaccccagaatggtagatccactgacagctaacatcgtgcacctggaaaagccacagacaatgccagcccgtgaaagcagccaggagggtctgtaccctgcaaaaccacagggtcggagctgcccaagaccatgggaacccacctcttgcatcagcattacctggatttgagacatggagtcaaaggagatcattttggagctttatgatttgactgtcctcctggatttcagacttacatggggcctgtattcgtactgaaaatcaagatcaagtgagcttttgcccttttgctccatgggatgtttctgtcctccctgagctcaccttaagacacctgcattactgtttgacaggtgtactgccccagtcaaactccccacctagcactgtccccagtcccctgactcatccctgcaagggggcctcccacttattctacacctctcatgtctcttcactgtgccagaatagagtcaagttcaacagggtcttctctccccactgactttttttgtttatgtgcatttactaacgtgagtattaaaatatgaatttatattgcctatttttaataaatacaagatgatattatttatattgtttacaggttttgtttttccttagctaaatatactgaattcctttccatgccagtattagtagatctagcatgcttttttaaatccccctattacccattatttaccatgaacctaattctacagacatactaaagttctttgcagattaacttttatttattttatttatgtgcttatgtttttgagacggagtttcacttttgttgcccaggctggagtgcaatggcgcaatctcggctcaccgcaacctccgcctcccaggttcaagcaattctcctgcctcagcctcccgagtagctgggattacaggcacgcaccaccacacctggctaattttgtatttttagtagagatggggtttctccatgttgaggctggtcttgaactcctgacctcaggtgatctgccgtcctcggcctcccaaagcgctgggattacaggcatgagccactgcgcctggccgcagattaacttttatatttcacatagctggtggcagaaataagggtagaagaaggagtgacagattggagtgatatcttagttgctaaaactctgctttgttcatcatctcagagagtgggtgcgtagggctggggaggcatacattctgaaaagagggggttgttgactaagaaataggcctccacctaacaaaacacccactgtgactatttacaatgtttgcatctcagcaaaaataccatttgtattctgaattcctttgtttcaactacataactcaataagaaagaaagtttcctacaattgaaaagaatagacagtgtttaaaggccaagttttgccttccttttaaggctgaatgtgctttattttaagccactcttcctcctcaagttaagaagggccttctggtatttctgtgcaaagcaccagtaatactgtttctttttaagttaatcatttttaatcctgcttattttatttagtgcctattgctatagcatctaatgagctcagcgcttctgacagtatgtcctatggatgcctgggggcagattgcctgggttggactctgctccagttcttattagttgtgtatgtcagctctgttttcccatctgttaaatgggatagtaatagccacaataatacctcatggctgttgtgaggattaaaataagaaaatgcaagtgaaagacagtccagaggatgggagaaaatatttgcaaattaggtatctgctaaaggtctagtatccgcaatagataaagaagtctttttattttttattttatttttttttgagatggagtcttgctttgtcacccagactggagtgcagtggtgtgatctcggctcactgcaacctctgcctcccaggttcaagcgattctcctccctcaacctcccaagtagctggtattacaggcatgcaccaccatgcctggctaattttggctaatttttctatttttgtagagacgtgtttcagcatgttggcccggctggtcttgaactctggacctcaggtgatatgctcaccttagcctcttaaagtgctgagattataggcgtgagtcatcatgtccagccaagaattcttataactcaacaatctaaagacaacccaattgaaaaatgagcaaaggaatagatatttctccagaaaagataaacaattggctaataattattgcccatgaaaagatggtcaacatcattagtcacttagggaaatgcaaatcaaaaccatagcgaaatttttctactttgtgcccactggtatggctgtaataaaaatggaaagaaatacgtgttggcaaggatgtgggaaaattagaaccttatattgcttgtgaaaatgtaaaatagtgtagcagttttggaaaatattttggcagttctacaaaaagttaagctttgagttatcatataactcagtaatttctctctaagttttctgcccaagaaaactgaaaacatatgttcacacaaaaacttgtacatggatattcataacagcattattcataataggcaaaaagtggaaacaaccaaaatgcccatcagccgacgaatggatcaacaaaatatggtcatttcatataatggagtattattcagccatacaggaaatacaggactgatacaagctgcaacatgcatgggccttgaaaacataatgctaagtgaaagacgtctggcacaaaaggtgacatatcctatgattccatttatatgaaatgtctgccactggaaaatccataaagagagaaagtaggctagtggtttattagggctcagaggctggcagggaatgggggagtaactgctaatgggtttctttctggggtgatgaaagtgtctggaattaagattggatgattgtcgcacaactttgtgcatacagtaaaaaaccacagaatcgtacatccgttaaatccggatggattttatggcgtgtgaattacatcccaatgacaaaaaataggataatagctgggaggtggtaccatgcccctaacatggtaagcactctatgtgttagttatttctgctgctgctgtcatcattttcattgttactacaaaatcaattccattcattattcctaaaaatatcaatttcttatggttatattatttctagttcttttcttcaaattacacaaatattagccactcagtgcttgcagaatattttcaaaggtctgcatttgtgaacaggtcctgggatggagagcctttgaattaccgtgggtgtatgtgttatccatttgcttacactgcatcttcttactataaaataaagtacttcttggcagatcatatggcatttatagatttttcttcttactttcttttatttgatttatataattgggtactctcaactcccgtgatggagagaaagcaaagaaaccaagaataggataacgctatggaatgcctcaatcttcttttagttttttatttttggttgaataattttagtttagttcatggaataaggtaaatattttacatttgttaataactccatactttgttctaggttcagtggcttacaaaaatatgtataacaaaacaaaattaaaaaatgaatcagtagagacaaaaagagcatggatgttaaaatgtaactaaaagatgccctgcacggtggctcactcctgtaatcccagcactttgggaggccaaggcgggcggataacttgaggtcaggagtttgagaccagcctggccaatatggtgaaaccccatctctactaaaaacacaattttttttttttttaggtggagtctcactctgtcaccaggctggagtgcagtggcgtgatctcggctcattgcaacctccgcctcccgggctcaagtgattctcttgcctcagctcccagagtagctgggactgcaggcacgtgccaccacacccagctaatttttgtatttttagtagagatgaggtttcaccatgttggtcaggctggtcttaatctcctgacctcgggatccgcccgcccctgcctcccaaagtgctgggattacagttgtgagctaccgcgcccagccttaaaaatacaaaaattaactgggtgtggtggcctgcgcctgtaatcccaggtacttgggtgactgaggcaggagaatcacttgaacctgggaggcggaggttgcagtgagctgagattgtgcctctgcactccagcctgggtgacagagtgagactccatctcaaaaaaaaaaaaaaaaaaagtaactaaaaggaaatacttaaaaaatactggaattcctcaatcttgatgaactatcctttccatgttttctcccatagttaaacaaggagtttttacttcttttgggcagtagctacatagtatgagacttctagtagtgcactatgctaacatcatcacacttgaatgttttttgaaaatattttacgtaaaatacatgtcccagatggactctattctttagttggttatctagaattaacatttggattatgtttgctaaatgcgtcagccatatcctaagcgctgtgatccttttagaactattaacagatgagactggggggcattttatggttataagagctaaatgatatttatgcaagtgtgtaaacattaataactcagcgtttataagcatgttagaatatttgattatggctagggaaatgcatattagctatctagcacagatctaaaagtgatctgggctatacctttcatttctggatttctttccttaagcttaaagggtgttctaatttcattattatcaatctcaagatcatttcacagtttcctggtggttgggtgtcatggtgactttttgttttccaggctctttgtttggatatgtggccttgtttgagttgtctttgattgctatatatctgtacccttgtttgcttttgcctggctactgattctcagtgtttcactttgacctttgataaagctgtgactctgattcatttttaggggggattcacctcgttggtggaatctagccttgccctgccaggcggctgcctgggtgttgcttgctggttggaatgtatccattgaaggccttagatgttggagtccttgcttcctagctccacctctttgtttcagggcaccactcttctggtctagtgcacagcctggtctctgtcaatcagcacgttctgcctggcgttttatggcatgttttcttcccccccacatagggtagcagcctttttataagttgtaatgggtttttgatacccactgtcatttttcttttcttttttttgagacagggtttcactctgtcacccaggctgaatgcagtggcacgatcacagcttcctgcagtcttgaactctgggactcaggcagtcctcccacctcatcctcccaagtagctgggactacaggtgtgcaccactattcccagttgctttttttaaaaaagttttttgggtcgggccgggtggctcacgcctgtaatcccagcactttgggaggccgaggtgggtagatcacgaggtcaggagttcgataccagcctggccaacatggtgaaacctggtgtctactaaaaatataacaattagctgggtgtggtggcgtgtgcctgtaatcccagctactcaggaggctgaggcaggagaatcgcttgaactcgggaggcgtgagttgcagtgaactgagatcatgccactgcactccagcctggtgacagagcgacactctgtctcaaaaaaaaaaaaaaagttttttgtagagacagaggcctcactatgttgcccaggctgatcttgaactcctggactcaagcaatccgccctcctcggcctcccaaagtgctgggattataggtgtgagctaccatgcccaggcttcccagtgtcattctgatttgaatttttctagaaagatttctagaatttttctagaatgattattgtatcctaaacatttatagcattatgttctttactttttattgcttagaaaaaaatagtttagttactactggtaatttgcaaattaaagaattatgtataaaattgctataggtgcctgtggttaaattcttttaccaagatttcacttctagagaactgaagaatttaccaaagtaaaaatggtctaactttattacttggtttatagaaatgaataaatcatagttaatagtacagtatattaataatactgtgctctaagctacagattagaaaaatatgcaccctgtttgtcacaataaatggagtgaccaaagctatagtatttcaaatctgtgactattatatatttttctataccaagtcacttctttttttgtttgtttgtttttgggacagagtcttgctctgtcacccaggctggagtgcaatggtgtgatctcagctcactgcaacctctaccttctgggttcaagtgattctcgtgcctcagcctccccagtagctgagattacaagcgtgcaccaccacacctggctaatttttgtatttcaatagagaaagggtttcatcatgttggccaggctggtcttgacctcctggcctcaagtgatctacctgcctcagcctcccaaagtgctgggattacaggtgtgagccacggtgcccggcctgtaccaagtaacatttctttctgtgtgcaggaatatacatgtgcttgttacagagttgagtttatcatattctatcaccatgtatttcccataaatctattaagttaaaatctgtgccacttatcaaagtttggagtgattacatatatatacataaccctatatgatctttgaattcagagccttgatgctagcctgagagtctgtgtgtatgaatgcaggtggcaagagtgaggcatggattgttgctattttttctaccggagtgccattattaacagtttcttttctgtatagtcactgtgaacactgttgtggggctgctccctgtgtgtggctctgcctcagaacccacagagtcggctggctcccagacctactctgtctctggttacaagtcagtgtcttatttactggaagttaaaagacagggcactgttgatttacactgtgcttcagcatgcccttattagtatttcttggttcttccatcagtgagtctctgatttcttcaccaaaaaataatcttgcagagagtcatgatcaaccctgtttttataaaacactgagctttggaaagggaaatgattactcatcacaactctaaacactaggataaaatgttcccatttagatcaatcaggggccaatttaattttctaatgaactttagaattgcttttgtggtctgcctttagggactattattataccagcttttcttctttttaatgtttctagaagtcaattttcatctttgccaagaattaaaggatccttaaacatgtggaaaagatgagaaaaacagtcagtggatcatcttgatgatgatggtcttgcaattttgcagaaggttgaaaaggcaatacatataacagattcatgttctttctattgaaatggacaagttagaggtctagattgaatacactctgtgtttagacttaataaacactttcaataagcttattcaatattttttaaattgacaacctgtattgggaactgcatatactatagagatcaaagttgacatttcttgccctcttgggcttacccaaaacaatatgtaatcaaattaagataagtactgggtgcacaaggaaggaaaacaggttgcctttagagactggaggagtcgtccagaagtccgctctgaagagaagatgtttaaaattaaacctgcaatgttcgtctgaattaagcaggttgagaacagggtgaaggaggcaggcatagcagcatgaaccaatatcccgaggcaggaaagggctgggtttgtcagagtaacatgaaggtcagtgtgctggagcaaactgaggagggtgagtgtttcaagacaaggcttggcataggagtggtcagatgattcagggccatatgaaccatgttaatttagttgttccaaagttcagagagttgattagaaggaataagaagagaatttaggagacagtgtcagaaggttattggctttaggctggaggcaagagatgacagtagcttggactgggggttgacagtggaactgaagagatgtggatggactcaagctgtatttaggaattagaaccaacaaaagttgatagaagggttagattgtggtattagaagaaaggattcatttcagcatcctggcatgaaccagtgaatggatgaaagtgcttttccgtagttgggaaagactagaggcagaatagatttgagagagaagcaacagttcagttttttgatgggttaaggttgaaatgagtctgtgagctatctcagtggagatgtcaagtaggtggttagttacatagtatgtgtttatctcttgctgcataataaattattatgaaacttagcagcaaatctatattagttatctattgctctgtaacaagtcaccccaacattggtgctttaaaacagcaaatatttattatctcatgcagtttccttggccaggaattttgaagtggtttagctaggtgattccagtccagggtctgtcatgagattgcactcaagatgctggccagggttgccatcatctgaagcttgaccgaggctagaggatctgattccaagatggcttatgtacatggcttttggcagaaggtctcagttccctgctggttctcggtcgaaggccacagtttctcgccacgtgggcctctctctagggtgcttgagtgtcttcatgacatggctgtgagcttctcttagagtgagagagatatgaaagaatgcaaaggggaagctgtaatacttttagtctcaaaagtccgactcatcacttctgccatattctattcagtagaagtgagtcaccaatttcagcccatactcagtgggtggggaattaagccccccgcttgaatagacagccaccaaataatttctgaatgtattttaaaaccaccacacatgattttgtaattgagaagaaaggtttgggctggaaataagacattaggagttttgcacatagatgctgtggagtgagtagatgcgtgaccacttagtaaaagtgtgaagaggtccaagactgatcctttaggaaatctaacttgtagaggatctgctgtggaggagtggaggagaaggaagaaatggaatctgggaagatgagaagaatttttcaggcagggagtgttctattctgtggaagcctactggaatgtgtatttgactttcatttttaagaatttattctctgaatgaatgaagaatgaataaataaatgtcatgtatatgttcaaaattttaattctaagtatgattgttattgaaatgcttataaaattaagaatggaaatcagcattaggaatgcataataacagagtgggagatattggtaaaaaattatttaatgtccagacaataaaatacctatgaagctttaaaatgacattattaaagaatgtgcactgtaataaaaacagatttataaagtattttaaataaatataaaatactatgtaaggaagaagcagacaaaaatgtctaggaggatgtatataaacctgttaatactggttatctctgggcagagggaaaatgggtggtttaagtttccttcctttggtttgtctaaatcttccttaataaatggaaattgcttttgtaataaaatgtttgaaaatatcccctcccaaaataaagaaaaataatgaaaataatgatagttgaaactcaattgaggggcccggcatattggctcatgcctgcaatcccagcaccttgagaggctgaggtgggaggattgcttgaggtcaggagtttgagatcagcctgggcaacacagcaagactccatctctaaaataatttttttaaaatattagctgggcttggtggctcatgcctgtagtctgaaccactcaggaggctgaggtgggaggattacttgagcacaagtcaaagctacagtgagctatgattgtgccattgcactccagcctgaagcctcaaaaaagaaaaaaaaacttgattgagaaaaattaaagtacaacatttggctctgaacttcctggcagccaagacaaaatgatacaaagaagatctctgatctttgtcaagacaccctgctttatgcctggtccccaaagtgagcagaagtgaggcaccttgccctctaaagcaattcctttctttttttctttctttttttttttcatttgaaggatttcttttttaaacttttattttaagttaaggggtacatgtgtaggtttgtttcatgggtaaatgtgtgtcacaggatgggggtttgtttacggattatttcatcatccaggtattaagcctagtatccattagttatttttcgtgatcgtttccctccccccaacctccaccctccaatagaccccagtgtatattgttccctgctatatatccatgtgttgtcatcatttagctcccacttaaaagtgagaaatgtggtatttggctttctgttcatatgttaatttgctaaggataatggcctccagctccatccatgtccctgcaaacaacatgatctcattccattttatggctgcatagtattccatagtgtgtatatgccacattttctttatccaatccaccactaatgggcatttaggttgattcaaagtctttgttactgtgctgcaatgtctttgtaacagagcaatttatattcctttgggtgtataccctgatatggcttgtctgtgtctccacccaaatctcatcttgaattcccaggtattatgggagggacccagtgggagtaattgaatcatggaggcaagtctttcccatgctgttcttgtgatagtgaataagtctcacgagaactgatggttttataaagaggcgtttccctgcacaagctctctctttgcctgctgccatccatgtaagatgtgacttgctcctccttgccttccaccatgattgtgaggcttccccagccacatggaactgtaagtccattaaatctctttctttggtaaattgcccagtcttgggtatatgtttatcagcagtgtgaaagcagactaatacatactcagtaatgggattgctgggtcaaatagtatttctgtctttaggtctttgaggaattgctatgttgtcttccacagtgtttgaactaatttacactcccaccaacagtgtgtaagtgttcctttttttcttcaacctcgctagcatcttttattttttgcctttttaataatagccattctgactggtgtgaaatttatatcattgtgtttttggttggcatttctctaatgatagtgatgttgagctttttttaatatgcttggccacatgtatgtcttcttttatttaaagcaatttcacataagctacagcgatgttcttaagtcttgggaaaacagagggcatactttaaaatgtaggttctgtgaaggcagttgtgcaggcacagggtagattcctatatgtggcttaggtaagctttgtgatgatttggtataacaaagtggtaaagtttttattatcttgagaatacagcagttggtattcccttagaccagattccttcacatctctggatgactgggctgcacctgattccttaagcctggctggagtcaaggagtctgtattctaagacaattctccaggggattctgatgttttgctacatctgggaatttgtgcagtgtactattctttttgaccatgatgacagttgggttttattgagaattaaccatgtggctcttgccgcatgctgattattatctttaattctcataacaattgtttaagggttgcatttttaccctctttgtatataggagaaaaataaattgttcaagacataaagcagtcaaaaagcagttccataaagtagttgggagctgagttttaccttataaggctgttgggatcaaatgagataatgtgtacaaagtggttagccctgtgtctggcacatagaaagtgtttaataaatgtcagttttattatgagaaaacatgattcatggatggagactctgatagcatccttagtgcatgcatctccctattccagtcatctgtccttcagtgttacgttttagatcagagttataggacatgtcaggcttattttatcttattttcttttatgagacaggttctcactctgtctcccaggctaaagtgcagtggtgtgatcatggctcactgcagcctcgaactcttgggttcaagtgatcctcccaccccaccctcccaagtagctgggaccacaggcatatgccaccacacccagctaatttttgtactttttgtagagacagggttttaccattttgcccaggctggtctcgaactcctgggctcaagtgatccactcgccttagcctcccaaagtgttgggattacagacatgagtcattgcgcccaggccatttcagcctgtttaacattccttttgcagagctggaacatccaactccaacttgtagaccagaaatactcctgaatttctttcctcagacttatctcagtggcaccagattgagttaggattgagtttagctgcaagtaagagaaacccttttacgatagattaactaagaaagaactcatttttctcaagtaagcttcagtctgtaggtaggcaacccagggctggttacctgctcagggaaactggcagcttctgtcttcctggaggaagcagaaaggcccagggcaagatgttcatgccagccaagtctgttaatttttatcagggaaataatagttctcctgggtcttccacccaatatacttctcccctcctctgggcggaattgagccaaatggttatctctagttgcaaggcaaggtgaatattttaactggccaccttgctacagggaaaaaaaatgggattaatcttgtaagtgagaaggagagaaaggatgcttgagtaggcaactagcagtgtgtaccatagtgagttccagcaaatagttctatcttaaataccatgtctagaggcatgatcagagtgaaaacaattctgattctagaattcaggttacctgtaattatattctgaaagaatgataggttgaaaatatgagtattaaaagacaaaattggaaccaagtacaatttctccatttgtcttataggggaatatatgaaaagttgagataaattaatctcttttcttcaaaaaaataacactgtgaaatgaacatgaaaaatgtttattgcatctggtttttttcctctatgttttatttcagtaaaatacagataacataaaatttattattttagccatttgaaatgtacatacatcttgttatataaccatcactaccatcgttctcctgaattcttttcttgttgaaaaactgaaaatatatacccattaaaccaggggtccccaagccctgggccacaggtcgctactagtctgttgcctgttaggaggcgagtcacacagcagggggtgagcggtgggtaatcgagcattacctcctgagctctgcctcctgtcagatcagcagcggcattcgattctcataggagcacgaaccctattgtggactgtgcatgtgagggatgtaggtcgtacactccttattagaatctaactaatgcctgatgatctgtggtgaaacagtttcatcccgaaaccactcccccactgcctcccccactgccccgcccatggaaaaattgtctttcacaaaaccggttcctttttggtgccaaaaaggttagggaccgccacattaaacaacaactcctcactcctctctcctcctagcccttggcaaccaccattttactttcactattctaggtacctcatgtaagtggaatcataccatagttttctttatgtgactggctgtgtcacttagcacactgtcctccatgttcatccatgttgtagcatgtgtctgaatttcctttctcttcaaggctggttattattccattttatgtaaatatcacattttgctaattaattgatctgtttgtggacacttgggttgcttccatcttttagcttttgtgaatagcgttcctattaacatggatgtacaaatatctctgagattctgctttcagttcttctggttatatcattgcatatgctttttactcagatcccgtttctccttgacataaccctaggtaatggtagttagcttactcttatcttgagggaaatgctaaagttttgaggaaagatcattcatccaaatctttttgtttgattgactcttgctaacctccaagaaaaatttgtgatcacgagttatattttatacagtccataggttcagggaagggagtaattctagtgttcctaaaagatgccattgcagtgctgtaatgcagaaaaacgctaggttttggggtgtccttaggaaggagacaagaaagaaaacagagaacgttatccttcctttgcaaagccatgttgactgtgcacatggattacgatctgagattctggtctcctacttaaatgatttaacagtggaaggtattctagtgaaggaaacccaagtcccggagcgaatgcatttgttacttttgtaaaactgactaaggtgatcagtactcttcagtctaaaaatatgaaagtggaaagaagacatacttaccagctataagcttatttcagaaaagcaaacataaacttattcttctaaccttcaacagttatctggactttttgatgcttaaaagaccagcaaatgttcaagacaaatgagaggaagagctattttacactgaagatataattagcaagtttgcagtacccagtgatagtatagactgaatttacaaattttttcttttaaaggcaataaatgtcagactcacagtagactattaaataaagacagtgctgccagaactctatttttttttttttttcttttgagacggagtcttgctctttcgctcaggcttgagtgcagaggtgcgatctcggctcagtgcaacctccgcctcttaagttcaagtgattctcctgcctcaacctcctgagtagctgggattacaagcgcacaccaccacacctggctaatttttgtatttttagtagagacaaggtttcatcatgttgaccaggctggtcttgaacttttgacttcagatgatccacctgcctcagcctcccaaagtgctgggattataggcatgagccactgtccccggcccagaaccctaatttttaacagtgacaagaagttaacatgaaggaagtcattaggaaagtgagtggcctgtaaatgaagtttcttgcgcttttgctcaggcaatggattttatctgtccccctcatccaaccctacctgaatgagctttttaattaaaaaattcattagtaaggctgggagcagtggttcatgcttgttatcccagcactttgtgtggtgtaggcgggcggactgcttgagccccggagttcgagaccagccagggcaacatggcgaaacctcgtgtctacagaaaaatacaaaaattagccaggcatgttggcacatgccctccaggtacctgggaggcagaggtgggagaatcgcttgagcctcggaagttgaaggctgcagtgagccgtgatcatactactgcactcaagcctaggtgacagagtgagactctgtctcaaacaaacaaacaaaaagtattagtagtttatgtgaaccttttcatagttatgaaaattaaaaataagaatatgtatttttcaatatgagactaaacctttcaattattttatttattaacttccaatttatacccttttaggcaaagagttctgtgatttatgggccaatttttaaactgtgatgtccatgggaagaaatttttagccctgagttttgaaggggaatgcagtgttcctttctgacttgtttttcctgcttattataaatatttatcttggacaaaggattgcattttagcggatgtgcaattttacaaatttaattattaaaatgactcttcttcctttttttatgatcttacattttgtttttaacttgtcatggcggatattaaaacactccaaataaagacaaaaaaactcaatataaaaaaaaaccaaaaaccacttccgaaatactccattttttcttatttaaaaaaatgctatttatagtagtagttggcatttcatcaaagtacataagcaaaggacagatactcctcattttttcccaggtttctattctttttctgaaagtgagtaaaatattaggctttggagaaagtctaggtagtttggtgtgatctgttggtagcattttgttttgccttaatcttctatttttttcttcccattttatttatttatttttttgagatggaggctcattcactttgtcgcccaggctggagtgcagcggcgcgatcttggctcactgcaacctccgcctcctgggttcaagagattctcatgtctcagcctcctgagtagtggaaattacaggtacgtgccaccatgcctggctaatttttgtatttttagtagagatggtgtttcaccatattgtccacttcttgaactcctgaccttaagtgatcctcctgccttggcctcccaaagtgctgagattacaggcatgagccaccatgcccggccttcttcccattttaataactaatgattttgccttaaaatacttgaatttattgcaaaaggtgtattttaaatgattcagctccctcttccacggtgtttctgtagtgaatagactggaagctgggaagaaagtgacctccataaacacagttattttacattatttctctctctgaagagagaattagcactctttttcacttccaagtggaaaacccactggacaggcaggtgcaaataaagcaatgtaaaccggcaagtttcatttttagaaatatgtgggctttatccagtttaggagcttagctcccgatacatttctgtctcccatcctttgggatttgggagctttttttgtttttggttgagtgttggcatctacagtatctcccttcctcctagatccttcctgtctgcatgtaaatacagatatgcagaagtctcccttattcttaccatcctccaccaaagcagacagacccgcagacagacagaccttgtgtcagcccagtttattttttagctgacaaattctcttcctttcctacttgtcctcattaaagtggagaaaaatacaccttttacaagatgggtgcattaaagaaaaaatgttacagaaggtattacgtatttattacaaacttagaaaatatggctaacaaataatagaatataagagtcactcagaatcttctaacgtacagatacagtgctaacattttggctcttggctttctgtcatacgtacacttacgtataagtgaagcactgtgtatattctttaatgacctgctttattaccccttaatacattgtgaaaatccttccatgtctttccatattcattatatgtatctgaatatcatttttttaaccttttgtgtttttttttagagacagggtcttactttgttgtcccactggagtacagtggcacaaccatagcttactccagcctcaaactcctgggttcaagcgattgtcccaccctagcctccagagtagctgggactacaggtgtggaccattctgcctggctaatattatttatttatttatttatttatttatttatttatttgagacaggatctcactcacccaaactggagtgcagtggtgtgatcacggctcactgcagcctccacctccccagattcaggtgatcttcccacctcagccacctgagtagctgggaccatggcgtgtgctaccatgccatgtgctaccacacctggctaagttttgtatcattttgtagagatgaggttttgccatgttgcccaggctggtggctcaagcagtccacccacttgggcctcccaaagtgctgggattacatgcatgagccaccttgccctacccgctagtatcctttttaatgcatgaaaatatacttttaaacagttctcatggatggacactgggaaagctagatgcctgtgagagtttgagctcctcagtgtgaagaccctctcctgtctgctctaatgttgcattttcctggtatgaaccctgaatatctgacagaggtctcagttaatttagaaagtttattttgctaagattgagagtgtgtgcctgtgacacagcctcaggaggtcctgatgatatgttcccaaggtggtcagagcacagtttggttttatacattttagggagacatgagacatcaatcaacatatgtaagatgaacattggcttggtctggaaaggcaggacaactcgaagtggggacggggcttccaggtcataggttaataagagacaaatggttgcattcttttgaatatctgattagcctctccgaaggaggcaatcagatatgcatttatctcagcgagcagaggggtgactgaataaaacgggaggcgggtttgccctaagcagttcccagcttgacttttccctttagcttagtgatttttggggccccaccgtttattttcctttcacactgggcttgcttgataagtttacctgagtatgctgctaatctctcacattttttggtgcaaagaggaatttctttccttaatcaatttctttctgtgcttaaaaaaattttttttgcactttttattttttaatggagagacaccattctttaagttaccaaagtctgagaagtttttgcacatccctttctccttcattactcttttttttttccccccctgagacggggtctggctgtgttgcccaggctggagtgcagtggcatgatctcggctcactgcaacctctgtctcccaggttcaagcgattctcccgcctcagcctcctgagtagctgggattgcaggcgtctgccaccacgcacagctaatttttgtatttttgctagagacagggttttaccatgttggccaggctggtcttgaactcctgacctcagatgatccgcccatcctggcctcccaaagtgctgggattacaggtgtgagccactgtgcccagcctttccttcattactcttataataattcagtagtccagtcccagcatgggggtgggggacttggagtaatattggtcaaagaatatagtttgacaggaggaataacttcaagagatctattgtacaaggtgatgattatagttaataacaatttggtgtatacttgaaaatagcatagagagcagattttaagtcttctcatcacaaataaatggtaaatatgtgaggcaaaagcactaataaataaaattttgtctcttaagagccatagagtctaattgagaatagaacgggagacacgctgtataataatgatcatgcccatccacctcaccacgtcccagcagcaaccttctctcttcaattcaatacctattgcatccacctccccctttcttgtctcattacttctctactctttcaggctcgctgatgtctagcacgggcaattctaataagcctcaaactggcttactttcttccggcctccctccccatgagtccatttttcatgttaatctcactaaagcacccttctgatcatgtcacgctcttgctcaggaaaagccaatggcccacattacctgctcatttaaccccttgctgtggccttcaaagtcctctgcaatttaactgcagcctgttccaaaattcagtggcatcacagctctgataaaaaaccacccagccaaaggaacctcttcacagttgtgtctgcatcatgtttttaggactttgctgcagctgttctctcttctacaaatgcctttctaaccatttttacgtgccccaaacatagtaattcaagatctagctcaaatgcaacctgttcctcaaatctttccgtgatccccttttcatccccatcaagacatatttgtctatgaatttatgaatgtatctgtacctgatatattagttataattttctgttgtcttagtcccttccccactcatcccaggccactggaccacagcttccttgaaagcaacatctggatctcttttgggactgacacatagtagatgctctgtaaatgttactatttctttgtacagtgtttttcacaaaatagttgtacaactaattgttatatttaataacaattagtcatttagactagaaaatataaaacttaagacaacaaacataacaaagagttggaaatattcccagttcttttttttttttgacacaaggtcttgctcagtcacctaggctggaatgcagtggtgcattcacaattccctgcagcctcaaactcctgggctcaagcaatccttccacctcagcctcttgaataagtggtactacaggcatgtaccaccatacccagacacttttttgattttttgtagggacagagtctccctgtgttacccaggctgatcttgaactcctgagctcaagagatccttcctggaggccacccaaagggctgagattacagatgtgagccacttgcctggtccccagttcttattatgtcagtttatttgactagaagtcttacaaaatgacctaagccaatttgattatgcgtaattataaattatggcttttttttgattggtaatgttggctcccaatgccactgtcttcctataagggtcataataaaggcaagtttcagaccaaatcctgccattaacattggcattcattaagcaatcattattcgcaagtaggctcgaaaaacagttcatacagcttgcatgtaaagttggtaagctgcagctctgtgtcatttttgttttttttgagacagagtctctctctgccgcccaggctagagtgcagtggtgcaatctcggctcactgcaagctccgcctccggggttcacaccattcttctgcctcagcctccccagtagctgggactataggcatgcaccaccacacccatctaatttttgtatttttacaaaaatacagggtttcacctgttagccatgatggtctcgatctcctgacctcgtgatctgccctccttggcctcccaaagtgctgggattacaggcgtgagccactgtgcccgacagctctgtgtccttttgaaggtcatagttaaagtaaatgcagcaatattctagagctgtataatttggtgcattgggtgctgagttcctgaactgtagctagtctgaattgaaataatgctgtaaatgtaatatacacacaggatttcaaaggcttagtaagaaaaaaagactataaaatatattttcaagatgttttaaaatattgagtatatgttgaaatgataatgttttggagatattgggttaaatagtacatattactaaaaattcattttacctgttttttaatgcggcttttaaaattatgtatgtgactttcattatctttttattagacaatgttgtcttagggagaggatttagtcttataatcagcagcagataactaaaatcctccagccaatggctgaacataggacctttagggatctagcctcccagactcactagatttttatattctgtttaatcagtggtggggcatgtctagaaaatattttgaccaatccttgttcattgaataacactaaaatcaacagtgggagaatatttctaacattctaattatgccaattattaagccacagtaaaagcacatttctcatattcattaattaacaaagtctctggtgttgatgaaaataaagataactgatgcctttgtagtggtccactctggagtttagcctttctaattaaattatagctgaacttctctggaatgttatactggcttggcacaaatgtgagcctctagtgtggtttgcacactggaatatgtgtgtcttactgtgatcttggcaagcttttgtagtggttaaggcacccaagatagcatcctacctgtctcttttcttagcgttcctttcataattcttctttttgactttataaaagaaagtcatacctctcactctcctcaaattttactgtgctgcattgctgtgaggcatcaaacaagaggacaatttaagaatgcaaaacaaagagcaatcctttacaaattttttaaatggctggtgcttgttgcatccagggcaaggctttgtgtccagctgccatccatccatccatccatccatccatccatccatccatccatccatccattcatccatccatccatccctttatcttagaaagagaattctgaagtgagatgttatttggaaacacctataacatggtttttaaatccaaaaccaagtcagactcctcttgtcagaaaataaatctgctttggctgattagtttgacagtgaggactagttttgccaattaggtaccagaggaggcattttctattaattgaatgagctaaatttgcaactccttaacaacatgctagaaattacatctttttcacgatttaaatttatgataaatatcagttctcaactttaaaatgtgcatggaaattcttttggaagttcacgaacaagagtgtttgaagcttctgacttaaactagtttaacacaagcatattacactttgtatgttgaaatcttctaaagtatattatagacattatataggaagttttaagaagaaaaagaaacgatggaaaaaggcaatccagaagagaaatggtagaaagagactgacccacatggtgcagggagcccagactggtacagcaggatggctctgtggctgagaattccaagatggcggcctgtgtcatgacacgtcagagaagggtgttgaaaaagaatattcagtgacgcaggatggagggaggtttgaatgttcaaaaaagtagaacaggcagaaggaggtgggttctgaaaatgaagaggagagaaagagggggagagtctttgctccaatgattctccaaatgatggggtgtagtaaagaaggcttggcagatttgtttgaggggatgttcattgtggcccttaaggttatgtaaacttttgtagatgtctaatcctgacgagctggagacactttctctttgacccatgagttttttgaggttgcattgttctttgatgctacctggagactctcctgtctggaagaatggaaagatcagtgctttaatgtatgtggattgctgttgtctgggtcttgtctatctcaaggtgttgtatgggctctgacacacagaggactaaattgaagtaaggaagcaagccaaactgtattattgctggtccattttatccattggagttgttggcttcagaatgtcatcattggcttttacaatgctcattcactgcttgatgcttttcaatttattattgaattatcatatatatgtgtattagtctcttcttatgctgctaataaagatatgctggagactaggtaatttataaagaaaaagaggtataacggactcatagttccacgtggcaaagggacgtctctcatggcagcaggcaagagagaatgagagccaaaggaaaggggaaaccccttataaaaccatcagctctcatgagacttattcattaccacaagaacagtatggggtaaaccacctccatgatttatcttctaccaggttcctcccataacccatgggaattatgggagctataattcaaaatgagatttgtgtgaggacacagacaaaccatatcaatatgtattctctcacaatatattttttatttgactatgatgacccggtgtcatgatcttagaagacacatggcatacagtgaaaggtttcctacattagctctatagaaaacatagcattcctatatatgcatctggagagatatttgggtaaagtattgttctctttttctttggatattttatacatttttttgtttgaaaattgctgtttcttggatattatattgttttattctgtgaatttatgaggaagatccctcataacatgaggaaaataatgaaataaataaagtaattaaaatgagaaaaatattatttgaataattagcagtcttacaaggacatatttttgctgctattttgacaagtagaacttgtcatgagaaagtctgaaggtcaaatcactggaatggtttttacattcaaaatgttttccccattttttttccaggcttatacatctagaattatatgttaatgagatagttgctttttcttgagatttctgcagacagtttgtagaacataatagatgtttatttgataataataaagtgaggaatttaatttcatagaaattttctttcataagtttagccttttgtcaatcaataaaaaaatgttttctgttggcttttcatgacagtgactcatatcattatgactaattcactgtgtcctaaataatccctccttgttctatgacatttctagcaattttaatgaaaatcttcactccaggacaaaaattcaaagtgaagtgtttgtatgtaaggtttacaatctctaccaccataaatggagtctgtttttctgcatttgcaacacatataatatggttgatagaaaagatgttgagtttttttttttttttttgcaaaatatatttctagaggaaaagtttcaaacagtgtcggatgcctgtaaatcttagaaacattctttcagtttaagtttaggcgctctagaaagtgcaagtagaaaaacattatctcctatattcctatgcattgtttaaaaaaacttgagtttgttgaaaagaaaacaggttaagaagtaaataaactaaaattagaagatggaattaatggttacatttaattctgaaaataactattttgagagtaaatcaatcatttggcaatatggtgtggattaaatgtgaaaaagcaatttctgaatcccagctacttcaggttagcatgctgttaaacttgaactcattcagaaagtcttcaggaggtgtctaagtttgggggttttgttaggtagtttctgtgttttcaaagtcagtcttacactaggatggctatacatttttttttaaaggaaaataacaaatattagtgaggatatggagaaattggaactctcatgcattatggtgaaaatgtaaaatgatgcagccactatgggaaatagtttgctggttcctcaaaaatctaaacatagaattactgtatattaacctagcaatttcactcctgcatctacacccaaaggaactgaaatcgggaactcagatacttgtacaccagtgttcattgtgacattgttcataatagccaaaaagtggtcaactagtgctcatctttagacaaatggataaagaaactgtagtttatacacacaatggaatattttttacccttataaaagaatgaagttctgatacaagctacaacatggatgaaaccttgaaaacattatgctaaatgaaataagccagacccaaaaggacaaatattgtatgattccacttacatgacatatcttaaataggcaaatgcatagaaacggacagtagattagctattaccaggggctggtgggtatggggacttattgcttaatgacagcagagtttatgttcagtgtgatgaaaaagttttgggactagatagtggttatggttgtataacactgtaggtgtaactaatgccactgaattgtatgattaaaaatgactgaaatcacaaatattgttatgtattttaccacaattaaaaaaaatctattaatatgccaaaaacgattgaattgtaaactttaattgggtgaattatatagtaggtgaatttaaatgggtaaattgtatggtaggtgagttctatggtaggtgtgtggatgaattgtatggtaggtgaattttatacctccataaaacaggtttttaaaaagaggcagtcttgtgagtaggaggagagctaggtaaggagacatgaatcttgatttgatttatggcaccatccaactgcatgtcatgaggggtaagtccttgacctctctggtcacaggatggaatcccatcaggcaccctcttatatacttcctactcctgtcctctgtggctccgtgatagtaaggtggatagttttggtgggttaggttggttctcagctggaacaaatatgttcctctggccaggcacagtggctcatgcctgtaatcccagcactttgagaggccaaggtgggtggatcacgaggtcaggagttcgagacaagcctggccaagatggtgaaaccccgtctctactaaaaatacaaaaattagccaggcttggtggcacacgcctataatcctagctacttgggaggctgagggaggagaaccgcttcaacctgggaggcagaggttgcagtgagccaagatcacaccattgcactccagcctgggcaataagagcgaaactcggtcttaaaaaaaaaaaatgttcctctgatgctgaacatgatataaattctaaatgcagtccagatgtggctgtagacattctaggatcccaaggctccataattgccttcagttttgggcagagtggatgggtcattgggtcatgctagcagagcatgtgcttgcttaaggaggttgatttttttcagataatctcgattttattacaagaacatttttaaagcatatattttaactccatacccttcttctcttttatgggcatatacagttttcaggattgaaaacttctgaaatttggattgtcttagccttattttgacatcattagatgttatagccctctgtgttttcttgtagataccaaaattatattaaacatgttcttttttgtgaggtattgagtctgaggctgaaatgaagaggtattgactaggcttattctatctagaatgtccttcccatctttgcatgaaccatacttcatctatttttcaagatatattttaaagccttctttccattaaattatctttaacctcctcctacatggaagtgcattgaacacaggctccacagtcagttagacctggttctctctgtggcccagcatttgctgggtgggtgatgctggacaattcatttaacttctgcctcagccttctcctttgacaagtggagttgttttcctttcccttctcacttccaccatttccacctctccttgccttagggcagagaggagttaccagcagaaagactggcagcattgcctgctgtctcctgctcaccattgctgatgattggcatttgtatttcaatatggcgtccgtgctctggaaaggaataatctggaaagatgactgggaagtagatggtttgcctgtgtcatcaccacgttttccctgttccctggggtggtgtacctgctcttgcaatattctctaatttctggatgaacctggctttggaaggtactgtgctgtaggtttttccaggagttttgtttgctttggagtttcttaacaaccatcattgccttggaggctttgtcaacattttgggcttccttgtcctcaatagatttgcttgttgggccacacttgtgccttttcacttattctcaccagggacttccttcactgggcatctggctgggattcttcttgcattaatgcacactcaagggcctctgaagaacatcatggaagcatgtgctggcatttttttccctccaattattggttatccaggacagtgatattacttcaattgttcaggctagtctggatatcaggatcattatctttatggcaggccaggttattatgaagaagcacccaggagctatgatacatacacagcagtacggagagaaaaagaacagcttgtgagagcatgaagagccagcccctgggatcaagaaaataccaggaatagctcactgccctgcgggcttcttctctcagaagaaatgagactataatggcttcacaggtttgatagccagtgaggtgacacagcatcttgggaagacatggtccacttgtgttattattgcccatcggattcattccccaagcaactagttcattgtaaactaaagcaaaacatatcgttaaaaaaaaaaaatcaacttgtatttagctttttacagagtgaagtgaaactctgttttaaatgcggtttttagctttaataacgtcaaggtttaaatgtggcaaactcacaaaaatatcatttgaaatgttaattatctaaacttcttgtacacttaggtagttttgacaattctgaaaactacatttttaattttggcttttttaaggtcctctgaggatgtcggattttgaaagaaactcagggaggttaaacatttctgtttgagagcagtctgtatcctgttggctttgtttctttgtctacatacatatttataatattttacagattattatataatatttattattcccatttgacattttaataaatattgtttgaataaatgaattagtgtttgggtgtgattgggtgtgatgaaacaagagagcataatggcataactaagtgtgagtggcagaattatattgggagtgattcacatgtagggcccacaaaaagaagaaatgagaatatgatctgaaatgcttttgttacttccaaaataataatctttgctaacgagagattggctttctagggtgtgttaagttttgcatttgtgaaagaggccttaataaaatcaatccaagtttaaaatcatccaataagagatttctttcttggctaaaggtctaggtgctactttcctgaataataagctgcactttagggaactcatgttatgttagtgtcagccaactggacactcttaaattgcttcaaatggtgtactagaggataatgctttctctctaataacagtagagttttagaggtgatttgtgtgctttcataggggaaacaactcctaatttctctgccacatttccagtttaggatttaaattgatatatgttgctacgttctgctaaaacaattttccatacccatttgagctggtgaagtgaaaacattttgaaaccagtttccttgaagatttatcaagcagttttgttgatgtgtcttgctatacttcttttacctatcacagaaataaaatcccaggctaggcagcagtgaaggcctttggatctgtgtgagcatgtcaaaagcattttaagaagagcaaaatatttagaggaagaatttgggaaagcagccttaagggatttaacacatttttcttcttctaattcagtctcgtgttcatccctctaatggagaaaggtcattaatggataagatttgctaagccagcaaaggcttttagaaacaaaatggttttcaaaaatccaagcctaaggaaaacagggtttgaatttgggagcttgaaagaatacatttagagaaggtgtatatgcagtgtaaattatattcattcacttaatattatacatatatatttataatcaagttatagtatgtttgttgcattcttacacatttttgttttggagaagttaaaataacgaattggcttgataatgaagattgaaataatttcagactgtggaagttctgtataaatttctaggcagacaaaatggctgatcagaatagcatgacggagttttagttgtcctgttactcgtctgctatttttacgtgcccgagatctgggccaagattgtttaccttaattgttgtgatgtggaggttagtaagtgtgtgaaatttgttacatttcaatctcataattgaaaagccacaggcaaattcttgttcttttactgaattcctgtctagtagaaaataagaagtatgtgtgtttgtatgtgtgtgtgtgtctgaaaaaaggaaaatgcaaactagtctttgaaatatgtactcccttttccccatttttaactgtatcaagagaatgaatgcggaagtgtgtttataaactttgaagtatttttgaaacatttggatgttagaaaatgtatcgtttacaggcaaataatttgtctgttacttagacttatattctgacattgacttgacccataaaataaagactattgttgaaatattatcttactcatttttacaaacataagaatgggaatccataaattttatttcatttcatatgtgataaaatggaaagattattatcattgatagggtaatagtgctcatttctttgcccactttatatctggggagaaacctacatagtattagatattttaatatgtttttgaaataagaaagttaaatgctccggaaacaggttaagaaaatgtaaaatgtagtaagatttctctcttagaattttttccatttttatggccccaaattcttaagttgtgtgaatgttatcaaattaagataatttaatacttatttatgacctttctatatttttttattcatgggattaaatgaaactgcatataacaagatttatgaaaataaatcctttttaaggtagtgggacaaataattggattttccaaatgccctaaacactgatttttaatattaaattcattttggtgaggctggtatatccccccttcaggttgatgtgtggtggtagccttatattctgagtataatctctactgtgtccctctttgatatgaagatggtaaagggtcattcactgtgtaagcaagttctcttggttaataaatggcttatgtggccttgatcagataatataaagcttgaaatagggatcgttgctgtctttgctgtcctttcttgaaggaaggtcacctctgagcaccattaatatcaaggagtttcttaaacagcagttttgttttctataccacttgctcccttagtgtcttggagttggtctccaattacctttatggatttgtaaaagtgcatttttttttttctgaagctgctgctatatttattctgggaatgaccttttaattacaaactctccttccacaagggggtaaggaccgaagaccacaaactgggtgaagtggtaggcgaacctctaatgatcctagcagaggttcgtgagcaggtctgtatttaatgtggaactgacactggagggccaagcacacctgggcttcctccattattattttgctgctctgatgtgggaggcagcccagcagtataaaaggtggcaaaggaggcaggacacacatatggatggagccacacctttctgcactgtcgcagatacgccttggacagctttctgaacaactgatagagattgtgaaaatgctgttttgtaggatttaagccaacaatgactcttttactggctttaatagaaaatcgtggagtgatggaagagtatgatttgaagaggtccaatgaatatttatttatctaccttgcttacacttttactgtaatcattataacaacgagctgaacaccagctcttcgtcaagtgcttttcatttatattcactaacctttacaatactcttgcaagctaggtattatttatccccattttacagatgagaactgtgaggaaaagcgatgttataatgacccaaggtcacacaataaatggattgggacaccgtctatttggttctaaagagaaagtccttttctctttttgttagccacatggactccttgtatgtaaccaaatccttctacccatatttcaaaagttcagggtggtcagtcttttaaagtaacttttcttttttttatggctcagaaaatgaatttgtaatcaaaaccaaaacggataatggttttaaattcttctgatttttctacctgtaaaagttcgtatagatcaagatcattaaaacctcatgccaatcttactacaggaaaatgggttacaagattgaccataaaccttatactgtcattctagagggtgtaggaccagtatgaagagggaggaagtcacgaattcctgagtttttattggataactttaatttttgtttttagcatgctgacattttgattatgctgaaattttacttgcacaaaatgtagcagaaagtgctacgggtactagctggaaagtagggctctgatttgatccgataaacctggatttggtcactgatggcaggactccggggtttagggtgagacaacctggtcccttgggaaaggtgcccgagcctccctctgttgtaggcagtgttgggctccataagtgtaccgggcagtcatcacattctgcattagctccgcctcattgtgctcaaggagctcgactaataggactattttaaactctccaggatagagataaccttatttggtgctttactaaaggtacagactctcatactttttccttctctttctttttccattccacagatgaacacaatgacgtacagaagaaaacctttaccaaatggataaatgctcgattttcaaaggtaactgagactttcaaaaacttcgatggttcagatgccgcattctgattgaaggagtttggttggaagtgcagtgaattttccccaggaaatgtcacctagccgaagtcttctgagtatgcagatacatttgttgttcctttattctgtcctaaaatatgtttaaacggaaattctcatgcacatagtttatgggacgctattgacttttacctggccttctccagatatctaaggcagcagttagctgctttcgattctgtgaatcctgggtacatcttggaaaagaatatatcattgggaaaatttttgagttctcttggttaagaggatgatgatttcattttgcctggttaaaaccaaatgttataattcaggcagtctttctaccctgtcagaaatatttatggatttttattcttgtggatgtggctaataatatttatctgccttgtgggttgttttttcttgtgtacttccttaattcctcccccaccccaaagatctactcttagcatttctaaccatttagaacataatcaatgctttgagcaatattttttcataggggcagagcatgctgaagagaggaattgtcagtgctattttcaaatctgttctaatatgattatctattagttattggtgttggaattttgtgcactaagcctgaggtaggaggagagttttcaggataacagattgtttaggactcttctacaacaagatgaaaaatagaagtttctcagagaaacactgttgtggtcttttaaatagtataaaagctattttaatgaagagttgcttttcaaaatttttggttgcttttcaaaagttgtaaaggtcagagagacaaacattggtatttcttgaggaaaaatgaggatatcttaaggttactttgagtagcagcatagtttaaaaaatgctccacgtcccaatatttatagttggttatttgatttcactgctttttgggctttgcgagtttatcttgaggggtattttatcttgcctgtgagtatgtaaggaacatgaaaaccaactttgacagagggttaaaaatacagagaattagaacataaaggtgcttgcataattggcagttatatgtgtaggattattccaaatcacatgcaggtgtgttttggtaaattttagtttgttttattccagagacacaggtaacatatgtgcatctcgggcttgacatgaataaaaacttttgaactattcatctgcatgtgaccattttccagagaatgtagttttagcaactgggagtctggatatgaggtgttttattccagtggtcttatgattgctcataaaagtaagattatttttcctggttattcacgaggataacacagtaattgtttagatagaacaagtgaagcagtttttagcagcttaatttagtctttggggaagaattgccttagaactaattttgaagattgttttgaaagcattaaacttggtagacctaagtttagagagcatttgaaactgggtaaattactttttacctatttatgaaaatggagagaaataggtagtaaaataggacatggaaagggtttgtagaggaagagagatgacaactgagacagaataattgaaaagaaatttctcaatatttatggtgggtcattgacacctttaaaaagacctcaaagaaaacaaaatctggtagtaccagactagtttattaaatgaacttgatatttaaatttgtgcatttataatgtctattattttgcaattaaatggggctttaagtcccatgtaaattgtttgccctggaatatttgtatttcttaccaagatactggaaaagacttggtaatttttatcatttttagtaaaagttatagttagttttagctaaaagcttctctattagtgtttggagatggtagtttctaagctcagcttctgtgttagtgtttggagatggtgtttggagaaaaactaccaaacgtgggatgactctgaaaacttttattttcatctagcaagaaatcaaaacctagaaggaatttatctgagaaattatgaatatttggagatgggaagctcatggcagtgacactaaacatccacattattttttctttcttctggctgtcttaagaccataagttggattgcttccaattggggatagtgaaagagggagtaacacatttctagactgggagatttccatagactcccatgtggcttaactcttgctgagctggggaaagaccgtattcatgcctggtattactaggtaatgcgaggatagaacaagaaaaaaaaataaatcccgttgaagggaacgaattttttttttcatttttaaaaatccatgtcctttggtacattgtggtgggttttacaatataatttttcagtgggtccactacttccctacagtgtgggttcctaaacagagcaacaggacctctgtgctgagaaatccaaacagacactgatggcaccttctgccatttaggaatttgttttaaaacagacatttgtctagatatttcctttgtggcctcctccccatcaaaagtcaatcaaacatcgagccttgttaattccaatacctacatatattcaaaattgtccacttactctatgtagagtgacacgtctcttttccaaggcattgttatttgtattagaaaaaatggtgagagactttacaatgggcaaaaaactagtgggtgtcctgttagctcaggcatctgaattatctctgcctttaattacttttgagctactttacgactaggtaagttgtggaaaataggtatgcaaatgattcttatccataaaaatgaaaattatttgtaaagcagttaattattactccttggatagaccagtttttgcatctattgcaaatctatttcagttttcatttttcttgtgtaaaacatgtgtttttaaaaattttcccctgaactggttgtaacagcttactgggtccctcattaattaatgagttaaataaatctttgacagacattattatcacattggtttgagagttatgactttaccttgttggaaaattatccttgaatacatggaccactgtgataatctgctaattggttcttccattccatgctccaccttctccatctccctttcctttttttttcttttctttttttttttttttttttttgagacacagtctagctctgttgcccagtctggagtgcagtggtgcaatcttggctcattgcagcctgcagcctctgcctcccaggttgcagcgattctcctgcctcagcctccctagtagctgggattatgggcgcatgtcaccatgcccagctaatttttgtatttttagtagagatggggtttcaccatgttggctaggctggtttcaaactcctgacctcaagtgatccgcctgcctcgacctcccaaagtgctgggattacaggcgtgagccaccacgcccggcctccccttccattttcaagagagtatctacggtgcttctaaagggtaaacctgaatacctttttctcttctgtaagctctttcgttgggtgcccattttcctttttttaaaaaacacaattaaaaattgaaattgtataatttttggtatatagtgtgatgttttggtcttacttggttcttaaagctctaaatagctgcctcccaatttactcctaattttattttactttcctctcgctccctcattttgctccagccacacggcctttgcttaccatcccggtgggccctccctggcctttgcacacagtcctttctctatctcttcctggccagctcctaccccttcctgcttgtctgagcttaaatgttgcttcctgaaggatctcttttctgagctcccagactagggtagataagctgtatactctcaaagtgttatgatttgaagcacttaccatactgtaatttaaatagttgccagccttttttcctaggttagacataaactctgtgggtgcagggactttctatttgcttattggcatatcttttggcatttagtaggtatccagtaaactatttgtaggcttaataaataaatgaatgacaatgacatagacatacattgaatatgcctaattctatatgttcataagccacttggggatggttgcattggagagacaggagtagagtttaggactgagtgcaacatggcatgaattgtgctaagtcctggatatgaatacaatgcatcaggacttttgctgcattattgacaaaaataaacaaatccagctatccaaactttccctatttacctgatttcttggagttgtgctgcagtgattgttaaataaccacttggacttaatgcatattattgttttatttacccaatacaattcttcacatagggtctaactattaaattcactgtgaagaaaaataagacttaaaacttaaagccagaacaattcttttcttgataagggatttggtaaagaacttgagaataatatcagtctaaaaccatcttttaatttgtaactgtaaatgaatatacagtaaccaagacagtgctcactcaaaatatgtattctttttgctgcaaatccttgtgaacatatcatggagtatacagtgctttggaattcaggatcctgagaagtcatagtgtagagtaaattatggctcttggatttttaaaagttatgaagagctcagaaaaagtgattatctaaaaaaagctaaaaattaggaaattaaacacttatttctggatatcctgctcatttatttatgacctcaggcaaattattagtcaattttttcagatcacctggtctacatttccatagccataagacgcaatcgatcattattaccttccttatatcgtgaagaaatattgaggcattgctgagaagtgtataggagatgataattacttaggaatgcaaaataaaaaccctatcatatacctcgaatctgtgatagtcctgatctgtggatccgtgccacacgtaaacagaaaagggaaaaagcactggctcattaagcccgcgttcttccattgtatggtgtgtatgacttgagtgttttgccccttctaaatttcagagcctctggcttgttagccggccggtctcccaagggaggcagcaaaggcctcattgctttgctttgggaaatttgctctgactttgagcctgcattttctttggctgactttcagagctgctcatctggcagagctgaaaacatacaaattgcagaagttcttttatccatttggtgagatggttctctaaagaggcttcacaaataaaggttaggtagaaaatatgcaaaattaaaaatgctgaacttgagtttgtgcaaatccctgcttttctcttttctaagacacagatgagccaagttttcatgtaagttacaattccaaccttgaaattcaaattgacagaacgtaagagaggaaagccatgaagcattttttatggattccaatatggagagctattaagatgttttcctttaggagacagtgagacattgcttttagattgttttcctacttttttcatgttggaagttaataatcactaaaataagggtgggaaaagatgtggagggagatttgtacaggaggtgcaataaaaggagcccaaacccttttccacctctagatattcagtcttctctttagtactgtaaagaggctgacaggcttcctgtgtgaagataaatcccatctatagtagaggcttgagcttgaagagttacacattgggtctgccattggtttatttcatgagtatgcatatggcaactcaactgattgttttaggagccatacacattcaagtggttccttaaaaagaaatgtgaatttgtgtctattcactaatacctctaaaaagaaaacaataaaatgtactccatattcttaaacaccagcttccagatactttggctatacttatgcaagctttgttgttgttgctgtttgttttgttttcattcaatttgaatttttaaaatttgatttttgtctcaaaattgtttgtaaaatgaacttcaccttggttaaaactaaaaacaaatgattaaaattaaaactgtcaagtattatttaatatgctatgctttgatgagtacttaatacagggttttgattcagcctattggtattcataattgtgaagcaaatttggtagtctttgtaattgacgatcagtttagaaattgatcaactgggaggaaatgacttttcacccttcacttaggaaggagtgagcaggaccaccttccttgtgctttcccattcagcctcttgtggccccaccatctctagcttcagagatgggctctggtggtgcagggaagggtgggcttatgccagggtgggaagtaaggtatcaagaggggattgctgagaggtagtggttgaggggagagaatctctacctattacacagagcaaggagacactggacccatttccagctgtatctggcctgggaagcttttagctgcaattgccacaggtaaccatccaccagccatgaggggagtcacacttagggggaagctgacatttatttttgttattatttgttggagaaataaaaaaccctgccaacactggtacctctggttaccaacatagaatacagagaaaacacaatttacaattaagtgtgcatgtatggttaagtgcatgcaggcagttggctaaagacgtcaaagtctggacagaatttcacacaaatattcagtaaagtgggagaaagaacaatgaacacttgtctctgtgagagacaactagatgtgccttgttgtgatagtctcttgtccaccttctcaacaactcctgtgtttaacttagcttgaaaaactggagactggatttatctatttcctgaccaaaaaaattgggtctattttgttttaaggagacaccctaagggaagggaaggagcagtgtacctgcctctcctttatatatattgaacaaaggaactttgattttatttacctttacactatcataatcagtgctattaccagtgcctcaccctagtctcatggaagcctatcttttgaaggactgccttcttcaaacatttctactgtattgccagttgtgtatacatggaataagctatattgtttcctgagtttgcctacagaccttgcctggtatgcataaagagtcagagctttttatttatttatttatgttgttttatttccataggttttggggggaacaggtggtgtttggttacatgagtaagttctttaacggtgatttggtgaggttttgatgcacccatcacccgagcagtatacactgtacccgatttgtaaaattttatccctcacccccactcccacctgcaccccccgcccaggtccccaaagtccattgtatcattcttatacctttggatcctcacagcttagctcccacttatgagtcagaacatatgatgtttggttgcccattcctgagttacttcacttagaataatggtctccagtttcatccaggttgctgcagataccattatttcattcctttttgatggctgaatagtattccatggtgtgtatatgtgtgtgtgtgtgtgtgtgtgtgtatatacacaccacaatttctttattcactcattgatcgatgggcatttgggctggttccatatttttgtaattgcaaattgtgctgctataaacatgcatgtgcaagcatctttttggtataatggctccttttccaaatgcctacctctgatgggcatttgggctggttccatgtttttgcaattgtgaattgtgctgctataaacatgagtgtgcaagcatcttttttgtataatgacttcttttcctctgggttgatacccagtaatgggattgctggatcaaatggtagttctacttttagttctttaaggaatctccacactgtattccatagtggttgtactagtttacatttccagcagcgttcccttttcactgcatcctcgccaacatctattggtttttgattttttgattacagccattcatgcaggagtgaagtggtatggcattgtggttttgatttgcatttccctgatcattagttatgttgagcattttttcatattcttgttgcccatttgtatatctgcttttgagaattgtccattcatgtccttagcccattttcttttttacttgctaatttggagtcagagcttattcagcctccagccctcacctgattgtccgtggagtatgctagtggcccctgcctctggccgccaggtatctgagccccacagtggtttcttatcatcccagattttatcatcactataccggtaacttaccaaaatcgaggtaaacattctgttacatgtctgtatgacttgtgattccctgaaagatattacttggtttggcatgtgttttacagtattttatagttctgaaggtaggtgcacatttactgattcggagtgttctctgcacatttacagtaaacactgtaaatcattgctctgtagttaatgaggcatactctgtgatgaccagcaccatctgtttctcttgtctttctctcttcctcttcttctctccctccctccttccaagcaagcttctaaatggaatctttttcaattcttagcaacttatgctgaccacccagaattcttaaagaggacggctgagagatctgcagtcactaattgtttaagtgactggagcacattttgctggttttctgttgtcgaggtgtggaaggaactcattaggcattattgcagtgccctcattttactttcagtcttctctgtggaaagcaatgctgtgtttgttcttttaccacagagttgaatcataaaagtaaatactacatatcatacagtcttcatttcgttgattcaactacacattttataattgagatgaacctaattttatcattttgcttaatcttgactagagacagcattctttttaaaacatctattatttgttttatgcagtaatacataaactttgtaaaaattagataaatcaataaatccaaagaaaattgttcaaactacttttaattccactaccaagagaaaaagtgtagcattttgttgtataatggtttaaaaatgtattatcatataaatatattatcattaactaagatgatgtacatagtgcttactgatgcattattgattattaagaaattgaaaaattacaagaatgtaaaagatgctacatttgtgtcagtgttgaaattggggttcatgagttaaagattctaatttgaaaaggtttagaaatgttgcattaaattatttctttttgaatttttaaattaaccaacttcttgcaaaaaacagatgaggagggagagagagagaccataaaatttacaatgttatcagatgcttgggcatcattttgaactatcaggggcatcagattaatctcaaattaatctgaggagagtgtgaatatattatggtatatacactatatatgtttgtgtgtgtgtgtgtgtatatatatatatatacacacaccatacacacacacacacacacacacacacacagtaaacaatgggactggtaattgaattaactagagtgtctcaaatcctgttttgaaaatagggtgtaaataaataatagaataatcagtgtcgaagggctcaaatttgttattcgtttgtaagatgacactcatcagacatgttacttttgaaagcatttaaaatctgttatcttccaactgtttttattatatgcagttataacttgattgctgataatgggtttaggtaagtcataggacagattctgtctccctgctgtatctgtttctttgtacaattttggcagcaccaagctagatttgcaaattcaccttaacgtgtttgccatattatgttagtactgttttttgtttaaatctacagtcatgtgtcacataaggatgttttactcattgatggaccacatatatgatcgtggtcccagaagatgataatgaagctgaaaaattcccatagcttagtgatgctgtaactgttataagggcatagcacaatgccatttactcgagtgtattagtctgttcttatgctgctactaaagacatactccagactgggtaatttataaaggaaagaggtttaattgacccacagttccacatggctgggaggccatggtgagaagcaaaggaggagcaaagtcacgtcttgcatggcgtcaggcaagagagagagcatgtgcagggaactaaccataagatctcatgagacttgttcactatcatgagaacagcacaggaaagacccacccccatgattcacttatctcccactgggcacctcccatgacacgtgggaattataggagctacaattcgagagttgggtggggacacagccaaactgtgtcatcaggtatttgtggtgatgctgttgtaaacaaacctactgtgctttcagttgtagaaatgtctagcacatacacttatgtacagtacataatacttggtagtgataaccaacaactgtgttactggcttatgtatttattataaatttatcattatttaattaatttatttattttgatatggagtcttgctctgttgcccaggctgaagtgcagagatacaattatggctcactgcaacctctacctcccctgttcaagcgattcttctgcctcagcttcctgagtagctgggattacaggcatgtgccaccacgactggctaatttttgtatttttagtagagacgggatttcaccatattggcaggctggtctcgaactcctgatctcatgatctgcccgccttggcctcccaaagtgctgggattgcaggtgtgagccactgtgtctggtccattattttagagggtactcctactcattaaaaaaaaaaaaagttaactacaaaacagcctcaggcagttccttcaggaggtgtcccagaagaaggcatcggtatcataggagatgacagctccatgtatgttattgcccctgaagaccttccagtgggacaagatctggaggtggaagacagtgatattattgatcctcaccctgtgtaggcctaggctaatgtgtatgtttgtgtcttagtttttgacaaaaaagtttgaaaactaaaaaaatacagttttaaaaattgaaaaagccttgtagaataaggacaaaatgaaacagaatattcttgcacagatgtgtgatgtgtttgtgttttaagctgttattataaaagtcaaaaaattaaagaaattgaaaaatttataaagtaatctaaggtttattattgaagaaagaaaaatattttaaaaataaatttagtgtagcctaagtgtacagtgtttataaggtcaacagtagtatacagtaatgtcctaggccttcacattcatttaccactcacccagagcaatttctagtcctgtacgcaccattcatgttaagtgtcctatacaggtgtactatatcttttttttttttttcgtttgagacagcgtatctctctgttgcccaggctggagtgcagtggcgcagtcttggttcactgcaacctccgcctcccaggttcaagcgattctcctgcctcagcctcctgcgtagctgggattacaagtgtgcaccaccacaaccagctaatttttatgttttaggagagatgggtttcaccacgttagccaggatggtctccaactcccaacctcaggtgatccacccgccttggcctcccaaagtgctgggattacaggcatgagccactgtatccagcctaaaatcttttatatcatattttgactgtaccttttctgtgtttagatacataaatacttaccatgtgttacagttgcctgcattattcagtacagtagcatgctctataggtttgtagcctaggagtgatatgctataccatctagcctaggtatattgtaggctattccatctcggtttgtgtaaatatactctatgatgtttgcacaatgatgaaatcacctaaggatgcatttctctgaatgtatccctgtccttaagtgactcatgactgtatttggaatctgagtgccgtgaagtcaagagctgctttcaccagccttgattttcgcatactgtatgacagaaagtaggcactgatctatctctctactggaaaatccaaggcccaattctgcatctgatttgttattgatacaaagaattagaatttcactcttttaagaaatccaaactgcactttctaaatcttactttcttattcaattttttgtagatttttttctattactactactattgctgaaaaacatgatctgtggtagaaatattaataattgtgctttgagagtattgaagtagggtaagaataatacagtatcagatcagagagagggtgggaccagatctcacaagatttttatttggagtttggattggatttgcctgtaatggatgcccattagggtaaatcagggaaattgacacaatgtggtctgcacattaaaattggaattattctggctcttacgtagaagcaaagagatcagttggctggagctggagttcaggcaatagataatggcggtttgggctagagttgacacaatgaccatggtaagaagtggtcatgtttgggatgtgtttttggaagtggaaggacagggctggtgggtaggttagaggtggagaagaagtgaaaggaaatgaatcaggaatgactcctttgtttttggcctgagcaagagtcattatttcttgatatgtgatgtatttgcaattaatcatattctgtagtccgtggatgtgtgtgtgtgtatgtgtgtgtgtgtgtgtgtgggtgtgtgcatatttgtgtgtggcctttctccagagttgaccagttccttaaggcattcctctttgattaatcctatatttcacctatatgtggtcatgctctatgcagaaattgctcatcggtcaccctatgacctggtgtgcctgtagacaagatctatttgtttagcacagtgttttaggaaattacagttaccaggaggttatacatataaattcagatttccaccttctttttaaaaatgagaagttctgcccacagtgaacctgaattcccatatggccacccttagctagaactgagcaggagctgccacttgagcctgcagagccagctgattctccagatgtgcctggggctcatcaggtttgcttccctcacatgtgtcatcactgcagttgtttgcagcccttgctccccgctagacccccctggcttctccccttgcattgtgctgaccgttcgcctttgtgctctaacattttaaaatccagcagcagtagtgtcccagccgcaagcatgagtgctggtctcacttgtcaaaatggtgatggtagagggagatgagacttggggacagccaaagctggccacgccagggctgtagtatctgtcatctagagttgtgtcatgtggttgtttactttttttaaagttaaatgtgacccaaggcttatatacccttcaagttcaagactgttcatttataccattttgtatttattggaaaactatggaaactctcttgagaataaggagaatgacctgaacttggcatttctgcagggccaagcacaaaggaggtattcactaaatatttgtccaaatgcattattcaactgtattctctttgtcagagaagtctctgcaaatgagtctttgcaaagatttcaaaattgaaataagaggttaactgtcaggatgaatcagtttttatttttattcatagatgacttctgacatttccaagctgtttcacagagtggatcccaagtttacagcttgtgataccaaagcaccagacacgctttaaagtggtgtactagaaaaaaaaatagtctgcattttgaattcatcaaaatgtagtatatatcttgttgctctctttggggggccactaaatatatcccacccactccagtgattaaatatttttttccctacatatcccagtccagtgatgaaatattttcttccctatctgtcctagtcctgtgtcttcataattttagtagcagtatagcacagatgttgaaaacatagatttagagccagattttgtggtatcagatcctggttctgcctctcatttgttaagtcacctccacatcagtttcttcgcctgtagaatgaagaagatgatgctgtttttctcgaaatactattataaggaaataaataatacatctaaataatacaactaaatctttataagtctcttagaacatatgatacatagtaaatgcttgctatcattatgtctaagaacatttcatatttctactgcctgtttccgtatggcctatgagctgagaatggtttttacagctttaggtggttgcaaaaaaatcaaaagaagagtaatattttgtgacatgtgggaattatgtgaaattcaaattttagtgtctataaataaagtttcattggaagatagtcattccaattggtttatttgtttatgtattctctatggctgctttcactttacaacaaaaggtagttaattgtttttgaatgagatatgttcctgcaggtcatcatatgacatattaatgaaacctgagacttgtgagatctttctctgtgaattgacactaccatgttctcatgttcagggcctgcttttgccttcctgcttgagatgaagaagtgcttagttgttgtctcagtcctttcagatattgttgatattttattacacttttctgccaatagaaaacactaaagttatgcttgtgatatagtcacatcaaccatttaatgaacatctgtcatcttagtttaacaggtaaacaaatagatgcagaaaggccaagtaacttgcccaaaattctatggccaataagaggcttcttgtttacagatgaggtcattaatggacatccataattatttataatatgaataaatatttatatttctttttttttttttgagatggagtctcgctctgtcacccaggctggagtgcagtggcgtgatcttggctcactgcaagctctgcctcccaggttcatgccattctcctgcctcagcctcccgagtagctgggactacaggcgcccgccaccacgcccggctaattttttttttttttttgtatttttagtagagacgggatttcactgtgttagccaggatggtctcgatctcctgacctcgtggtccgcccgcctcggcctcctaaagtgctgggattacaggcgtgagccatcgtgccaggcctgtatttcttttatataatgctgtttttgttgttgttgtttgtttgtttgtttgtttttttgagacagagtcttgctgtgttgcctaggttgtagtgcagtggcatgcagtctccatctcctctgggttcaagcaattttcctgcctcagtctcccaagtagctgggattacaggtgtgcaccaccacacccagccaatttttgtatttttagtagagatggggttttgccacattggccaggctggtctcgaattcctgctcaagtgatcctctcgcctcggcctcccaaagtgctgagattacagacatgagccaccgtgcccagccagttgttttatattatactattttttggaaagtggagagtggatttgagaagggtttcaggctgcccaggtgttatattagctgcccttgccatcatcagtattttctaagatcctttctatgcctatataaccccatttgtttctcccatgcgctttacctatataatatatttttgctatgcctaagacctgaaagtgaattcggttatttgttggctattttgcagaattgtacttctggttgggtgggggagggggattagacgtaggcaggtgacgaaggccacttctgcccattgcttttactgacagtgggtagcaagtcctcaggggactttcccctcaaggggaaattaccccttacccggcttcctgaagttctgcctctggaaagtggcccctgcatcttgcacatctctgtgttattttgattgatggagaaaatctctttgtccctgaatctatcgctgcctgtgaaaaaggcagctgggaacagaaaagcagctttgtttcagatatgaataagtaacagtgtattctttactgattctgtggtgaaaatttactgcactttccctcatctgaagtatatgaatgatgaaaaaggcacatgctaaaaattatgagttggctatacctaatacctgtttaaaaacagatagagggaggggaacaagggttgaaaaactacctactgggtactgtgttcactacttgggcaatggggtcattcgagacccaaacctcagtgtcacacaacatacccatgtaacaaacctgcatatgaactccctgaatctgaatgttttaaaagataattaaattatgccttgtaaaaaactaaataaagtctagttcaagggtcagctcctgtctgaagcctttgcccactccctggcttgcagtggtcttggggtctctctctcctctgtgcttctatagcactggcacacttttctattccagaccttacacatcgcactgtaattgttattttctaaaaaagagtatcacttccactgaatggtaagctgttgagtgtgcagaaatatggaatctttattcatctttgtaattcaggtctcttcaggtacacacacttgtgcgcacacagacacagacacacacacacacacacacacacaataaaaacagataaggaatcacgagggaaggaaggaaggaataatgccaaattttaggaaacttcagaatggctccttcttccccctcctccatttcaaactcagagtaaagttttgcttcatatgaatgatatgtatatattttttaaagtgagaaatgaagaagataaaagaagtattggttaaaaaatatctattattgacaggaagtgggactgttcatctctgtggagattttattatataaggcagtaattcgatacaagataatacaacatttattaaatattacattgtattctgtagttctcagggcattttcttataatattctattatttgatctttacagtgacttttgatttaaaaggttaggtagctgagccaggttcaccaggtagttaaaggtcaaactggacttaaagccgaggcttcctgattttctatgcggtgatcaccccattgcataataattcattgtatcacagacaggcaaggatctaccaaacttacagtgaatggagtgggattttctggcatcagacactagagcaggattatctgtgggagttgatgctatttatcaggaaaaagagtttagaaattctataagctttgtcagttaaaatcttggactggtactagttttaagcacaaaaagtatttaattgttaagcccaaagtgccttaagtgttaagaaattaataaccagaaatacagactgaacacctcagccctgaaattgatgaccaaatcacgtactcccataatggaaaggctggaagacattgtcacactgtgatgtgagacgcagtgatgaagtgacagtccttatacttttagttggcctctgcacccggatgttgtaggctcatttacatttttaatgcgtctcgttatcattgctttctcaggaacatatgccatactcaaggcctattattttgtcgtttattgttctttcttccactttactgtatatttgtgtgaaattatgtccagactttgtagtgtttttgttttttgagatggagtcttgccatgttgcccaggctggagtgcagtggcacgatcttggctcactgcaaccttcacctcctgggttcaagcaactctcctgcctcagcctcccgagtagttgggattgcaggtgcctaccgccatgcccggctaatttttgtatttttactagagatgaggtttcaccatattggccaggctggtctcaaacttctgagcttgcctcggcctcccaagtgctggaattacaggcatgaaccacgatgcccaacagcttgatttgctttctttgtaaggaaaaatgcaatttatttcagcttaaaatattctttatgggatttaaaaatttctgtatttgtacttgttctttctataaaagacaaatttgggccgggtgcagtggctcacgcctgtaatcccagcactttgggaggccgaggtgggcggatcatgaggtcaggagatcgagaccatcctggctaacatggtgaaaccccatctctactaaaaatataaaaaattagctgggcgtggtggcgggcgcctgtagtcccagctactcgggaggctgaggcaggagaatggcgtgaaccctggaggcggaggttgcagtgagctgagatcactccactgcactccagcctgggcgacagagtgagactctgtctaaaaaaaaaattaattaattaaaataaataaataaataaaaacccccaaaagacaaatttggatagtctgcagatcatccacaacattttaattgagcaaaaaatgaagccactcatttatttgcccaggtatatatggagtttctgctgttggcataccccatattttatttgtgtttttcttttacagagtgggaaaccacccatcaatgatatgttcacagacctcaaagatggaaggaagctattggatcttctagaaggcctcacaggaacatcactggtgagcaagtcatctttgtaaacaacggagtctccggtcattgctgatacttgatgacccagtgtgggtacccattaaagtgaaagtatccattttactttacgttcaaatgtaaaggctgaaattcggaacatttttaacaaagcattttaatgagtgctttgatacaacaacattttggctcttctgagggctctgtttttattgaagataaaattaccttaaatgtttattgctctgagacagcccaggatgagagaattacaaaaaagaatggatttatagagaggacacaatgttttgaacagtagagtctggagacaaacacatttaagagttaaatattttttaaaacagttgttaaggctgggcgcggtagctcacgcctgtaatcctagcactttgggaagccaaggtgggcggattgcctgagctcagcagttcgagaccagcctgagcaacatggtgaaaccccatctctactaaaatacaaaaaattagctgggtgtggcggcatgtgcctgtaatcccaggtactcaggaggctgaggccaggagaattgcttgaacacaggaggtggaggttgcagtgagccgagattgcgccactgcactccagcctgggcaacagagtgagactccgtctcaaaaaaaaaaaaaagttgttaaaaactatgacatctattttttattcagattttcaggattatattttgttgatttattttttaaatacaactctattattttatgtgtggggtactccaaactcatgcagataaaactgccaataaagaggatgcatgtatgggtacaaatgttaactctagaggtagaattactatcacagtacagagagatgcactcctgaagatgaatttctttcttgcagaagtgtgggatgtcattctctctctttgccctccaggtagtgggtagacaactgttagacaggctgattcctctctcagataaggttctggccagtgaagtagaaagaagctgcataggttatctttccccagatgggaattccctgccttccgagggctcttgcaatgctacctggagcctgggatggtgcctctgaatcctccttgctctgttcacatctgtgcagaataaagaggacacaatttctctaaaatccttctgcagccagaccaattaagagaaaggaagctttgttcatagagcactggtttccaaacttgtctgcacattagaactacaggcaatcttttaaaaatcccaagtccagaccacaccctagacccattaagccacactctttgggggtggggttggacagaggtattggtgtttttatgaagctgcctaggagatttcaacgtgcatgcaagttagggaactggtatcttaagatgttgttagttgagggattttcatactgtgaacaccagcttccagggtggtaacctgagacctcagccagatctcctgcctctgaggggccctgtacgctgagcttcacttctgtgtgtatctcagtgctagtgttagtcaggcatatggagggacaatcagttttacttgcttttttgttttattttccagccaaaggaacgtggttccacaagggtacatgccttaaataacgtcaacagagtgctgcaggttttacatcagaacaatgtaagtgtgtaatgtgagttctgggggtctgtgctgccatcagcattatttattgtgaaactcaccaactgcttgatgcattggcatccactgattcttgcaaacattttttcttatgagaaatactgaactttttctgtgagtgaagaaacagtcatgtgctttttctgatggctgtattgatctgtagtataaataatacatttttgagatttaagcttacctgattctctaaaatgaaatttctcttatctctcacttatactgctgtccaaatgtgctaaaataaaaacctggagttctgtgaagaaattgtcttaaaagcgtttttgtttttgttttttgttttgtcttaataggtggaattagtgaatatagggggaactgacattgtggatggaaatcacaaactgactttggggttactttggagcatcattttgcactggcaggtggggaaatttccaatcactttttaatagagatggaaaatgtgttgtttgtcttttagtttcttaaggctgccgtaaccaagtaccacaagctgcttggcttgaacaacagaaatttgttgtctcccagttctggaggccagaagtccaagatcaaggcatcagcagggttggtttttcctgagggctctgagggagactctgatccaggccttgcccccaaattctggtggtttgtctgcaatttttgcagttccttggcctgtgataacatagctccagtgttgacgtggtgttctccctgtgtgcatatctgtcaaatttcctctttttgtaaggacatcagtcatattggatttagggcccacattactcctgtatgacctcattctaactagtgacatctgcaatgaccttatttccaaatagagcccctctctgaagtactgagggttaggacttcaacatattaattttagagaacataattcaactcataacaattttcaatggaagaggctgacaaaatgccctattttcctggcatagggaaaaaagtacctacctttcttatgttaaattttaaaaagggacataatttcacatctagaaaagttgcaggaatagttcaaagaattcccaagtacctttcactcacatttcctaaatgttaccagttgtctatatttcatttgtactctctctcagtctgcctaaaatatttagtgtgtattttctaacgccatggcattctcctaaaaacaagaactctcttatgtaaacacaatagcatattggtataataatatgagatgtaaaatattgatatttaaaatgccaattattgattattaaatatgaaaacttagtatataattattaaaatcaagaaaataacattgaaataatacaattatgtaatctacagatcttaagattttgtcagttgtcccaataatatccttagtagcaaaagaaaatctgagatcatgcattacatttatttttcatgtctctttagtcctctttaatctggaagtttttgagtctttgtatttcatgatattgatatttttgaagagtgctggctagttattttgtagaatgtctctctcagtgggcttgggcttggctgagctttccttatgattaagttcaggttgttcacttttggcagggacgtcacaaaagtgacgtgagttcttcttagtgcatcatatcggggataggtgatatctgttctttttctggcagtgttaactttgattgtttggctaaggtggtatttaccaagtttcttccctgtaaattgactaccctttgttattaaaagtatcgggtggggatatactttgagactgtataaatatttagtttttatcaaacttttagcacccgttcataatttttgcctggaccagctattattatgatgcttgatagataatgattttctaatttcattaatccttctacattagttggtgttctacttgtaaagaagagcttccccttgtttcttgtttctctatcttatctctctctccattcatttattcatttatgtatcagtatagattcatggacatttgcataggtttatgatcttttactagtactcatttcagtgttcaagtcatcctagatttggccagtgtgagccccttaaattggctcctgtgtcccttagatagatctatgtcattctttgagcactttcttaaaacatatttactaatttagaataatactataaaatgttagttctagagtataatcgtgattgcagtcaggaaagatactttattttgtagtcactcaaaagtttttcctttctcatttttgtagaaaataaaatttaattgaaaaggtctttgtaaacacatagagttaaatatgactttctatgactgtgaaagttatgttcattgtaaccaaacatagtacaagtattgcttaagatatagaaaacacagtaatgtataaaagtgaggtaaaaatcacctcaaattctagtcccccaaaataatcactgttaaaatgtattgctctagtgtctacagaaaaatctgaagtaaaatgaatgccagttacctgatccataatggttaattagtgcaatattgctttttcaaggacttcattgaagtaagttgaagtaaattactgaagtattagttatggacaggcctggtttctcttacataggtgaaagatgtcatgaaggatgtcatgtcggacctgcagcagacgaacagtgagaagatcctgctcagctgggtgcgtcagaccaccaggccctacagccaagtcaacgtcctcaacttcaccaccagctggacagatggactcgcctttaatgctgtcctccaccgacataagtgagacattactctatctagaagtgggctttacaaattcatgtctcctctctgtccctttgctgccaccactactccctgaagccccttctccagtgccactgctctcctttctgcacatgttctaccaaaaccttaagaaaagaaatatcatggaagaaaactacccatcaggtttttatttccttaggacttaaatgctgcaatacaaggtccatagtttctcctgcatatttatgaatttaaaaaatatgaaataattcacaaagttcaaccccactcattcagcactaactgataatgtatacaaaaaattgtgttagcttttcttctcaaactgaaagtaaaactctgtaaattcaatgcattcccaattaaaaatagccaaattgtctttaatgaaacttgtgaacagattctaattatataaaagacgaggcccaagaatagccagtagacttctgaggaagaatcaggctgaaatactttccaaaaagaaaccaaaactatgaagctatattaattaagactatgcagtactatcaatatacacaccaatataagctgaaccatatgaaattgccgacatgtgagtgtttttgctatataagaatggtgttttcatatggttcaacctaataaaattaagaactcagaaattgctccattacacaggaaaatctgatatacgcttgagctgacattgcagattaatagatgatttggacaattgattacccatatataaataaatgtattggatctttacttcaccacactaaaaaaaaaataataatttctacatggatcagggatttaaatgccaaaggcaaaatttgttatattttattgttgtaaatgattacttttctcaaatttcacttcctctatgtttttttgctggtatataaaagtgcaatagacttttctacgtcttatatctggaaacttaatcagttcttacaaattttagtaagtttgtctctagattgtaggtttcttggaggaggagggattagaatgtcctagaattatgatccttttatttcttctgttttcttttttgttctctattgtgccttgtccttcaatgcaatgttgatttgaattggtgatagtgggcagaatttttgttgttgataataaaaggagtgcttttagtgttttaccataagaatgatagtttttgtagcttttttggtacactttttatgaggttaaaggaggttgccctaggtttttagttggttaagggattttatcaagaaactgtagaattttagccaatataccattccatttattaattaattgattcaacaaatacgtgtggggtgccttttatgtgctagacacagggtatacagcagagaacaaaacaggcaaaaatcttagttctcgtggagcttatgttccaacagagggagacaagacaataataaagttgtgtagtatatagaaatgtacacacactgaaggaaaatacatcagacaagagcagaggaggcacttggcatcggagagggcagtggctgcagtgacctgagtggggggagtaatgggagatgaattcagggagggaagtgggggaagtgcatcccagaaggtgggtgggtctaacatgcaagaacagacacagaataaagaaaatgattaacttttggataagtcaaagcaacaataatgtccaatttgtgagattaaaagaaaatcaagatagaaatgaaatacagtcctagacaatatagtagtagcatggaagcaggggattggagggaaactcttccaaggcttttgttttaggaatatcctgagaacagattagagctagattttgtgttctgctaatcttgatcttttaattgaagaatttagtccattaacattgattatgattatttatatatttaggttcatttttaccgcatagtgtgagctgctcatttttcttattttttctgtggttttttttttttttactttcttatctctttttgtatcggtaggtttccctttacccccttttcttcttctactctttgggaaacattatatactacttctagtcttaatggttaccacagaaaatagcagtcctatttagctaatacaagacccttggaaagtattatctgttattttcatatttgtgaattaatttcaagtatgtatttgacaagcctttgggatataaaaataaactcaaaaaaacctcacaaataaaaataatctaaaactaaaatgtattagattataacaatgcctactttgtttccacatatttcatcttcattgcattttatttgcatggttttcagacctgatctcttcagctgggataaagttgtcaaaatgtcaccaattgagagacttgaacatgccttcagcaaggctcaaacttatttgggaattgaaaagctgttagatcctgaaggtattgtccagtatttaatttccaccttgattttgctttacagttttgcattcttgaaaagcagtgtttctttgtccttttaaaaatgaattatgagacttgaagaaccttttcctttttggagtataggtgcgagtcattttattactgacacttattaatacttttgtacttagcagtttgtgggatcttttaggtagaaatttaactacagcactggacaatagttaatctaaattaagtaagagttaaagttttaagaaaatgtaattattagataaattcagtatctggttagtccaataaaatgcatttttatgtgagcatcttgcatgtgatgtaaagactttagttataaatgttgcaggattgaattctagacttattttcatagtatgaataaagtctgtatctttatcttaaatggtaacatatggtagcttatctttgaccattttggggaggcttttagggaagactttaaaaaatgagatactgaacaaaaataagtaatcccttttgcctttgtctcatatattatgaagtggcaatttactggtattgcaaagattatatattaggtattgtttatgggtactaaggagagttattttatatctaatattgagcaattcacatattttggacacctaatttaagctggttcttatattcttccacttttagatgttgccgttcagcttcctgacaagaaatccataattatgtatttaacatctttgtttgaggtgctacctcagcaagtcaccatagacgccatccgtgaggtagagacactcccaaggaaatataaaaaagaatgtgaagaagaggcaattaatatacaggtacaggtaacattttattaagatgtttggcttgccgtatttgttttctcctaggtactagataaaaacacttttagagggtttttttcttgactgagaacatcttggtttctcagcttacatttgcataagaagttcagcttagcagttagcattctgtcacatgtgtgtaatagaacaccataactcaatggactttattaagaaggaaaatactttatttcacccagcaaaactgggctgttgctcatgctgctgcatgacatgctgggaatctatgttttcacatcatctggttgccagcttttatttctgtcatgtgctaaagatggtttttctcatatcagcctagttttttttctaagtactaattgtctttctttttttgccattgagaaaagattttttttccattatatatctcacaagggctatcaaaatgtaagccttattttccctttcctttaggaggagtaatgtatggtaaactacttggtgagcttttcatgaagggattacgatgatttcattcatcaggatataaatgaatttttaaagagagaaataaaatcataatttattttcttccttagttctactgtttgaatcaatccatatttaatctcattctgttttagtctagccagtccttgtaattcataagatgagagaatcttaagaattggaccttagaagtcacttggttcaacattctagtgaccaagcaaccaagacatacatgtagatttcaaaattataagaactacatttcagagagaaagaaagcttctctggatggaccttaaattcatcctgttgctacttgttttgggttgttacttaaactctcaatcacagttttgtctgcaaaatgtggttaaaaccaccaacttcataaagataatgaattcaaagtatctaaaatgacattaataaacactcaacaagcaacagctatcattattatcatttttcttcttgatttgttttggcattctcatttaacagatttctttaaaaaatattatttaattcccatattatgatactagtcttgaattgacatagcatcttttttttccatcctctgagattcagagaatttacttattcttttaaattttctttgggtaatatgtacccatccttttatttcccccgtttcaaaaatagtgtgatttatagaaaaagaaaaaaatttactgaaaagaaaggattgagaaatgaggcctgattgtgaacccagggctctcttttgtagtgaatatcaaatgatgctgaggaaaattcctaacttactataattgaaaaaaatgctaggaagtatttgcctctaaaagtatagttattattctacattaatgatgcacctttttagttggctcagatgatcttctgagtttgttacagggttttagattcatttccttattgcattttgttagaaggaggagatattttatttagttcttatagttaagggccttctctcttaaaaaggaaggagacttcatttacttttcatgatgtgtagataaaataatcacttctgtttagggctcagcgtggcatgataagaacttcagaaaacatttgctatttgattaagtgcaagtgtattaacacctcttcatttgcaagctttcattagtgtcttagaggctgaattacgttaattgaaaactaaaatgtgatcaagttttaatcatctctctgacatagcttgccatctgctactctcctaatagtcagacttcttctgccctgttctttctacaaacatacgctggtggtcaatgaataattcctgcatttctctttaaatatccgtcagttgaaagtttcctcatgtgttcgaattaataccgtctgaacatttgtgtttagatagtgccttccttctcgacctcatggatgctggtgcctatctcagtgacctttggctggtcactaactttcctggttcttagaaattctcattatagtatagaggtttggagctaaatgatctccaggggttattttagctctacagttttaggattttttgtccataacttaactcatttttctttctctgtctttggcaccatctgtcttttaattatccactgtttcgactctgtgctgattggttcatttcttaactcatatattcagtttcctggattcttcaagccttcctccaaaatgtcttttgtgtgtgttttcattttattgcagccttcatactcatttttattttatttttttagtattatactttaagttttagggtacatgtgcacaacatgaaggtttgttacatatgtatacatgtgccacgggtggtgtgctgcacccattaactcgtcctttagcattaggtatatctcctaatgctatttaaagacttcattttctcctatagtttacaagctgtggcctacctctgctactctgccctgcagttagagtggacttttcccccaagactcttgttcatgcaggttcccctctgttaaatgcttctgcacccaccattatatggcagcctgcacatttttcctcagtttaaatggagccttttcagagaagtcttttctgattaatctatcaaaatacaactctctgtctctctctctctttctgtcactctatcttggtttcttactatcacagtatttttgtaaactgtgttaagaattttaaattgtatcttaagagcattgggaaagccagtgaaaggttttcagcaggtacgtcttatgatggcattacatttttgaaagatcattctggctgctgtgtgagaaatggactgtggattgtgaaggtgagagtgttgggtgggggaaaacaggaaagtaaagacacttgttagcaggtattccagttcagaagatggatgtgtgtggttgtggaaatggaaaggtctggatggatttgagataagtcttttttttttttaatatatattttttattgatcattcttgggtgtttctcgcagagggggatttggcagggtcacaggacaatagtggagggaaggtcagcagataaacaagtgaacaaaggtctctggttttcctaggcagaggaccctgcggccttccgcagtgtttgtgtccctgggtccttgagattagggagtggtgatgactcttaacgagcatgctgccttctagcatctgtttaacaaagcacatcttgcaccgcccttaatccatttaaccctgagtggacacagcacatgtttcagagagcacagggttgggggcaaggtcacagatcaacaggatcccaaggcagaagaatttttcttagtacagaacaaaatgaaaagtctcccatgtctccttctttctacacagacacggcaaccatccgatttctcaatcttttccccacctttcccccctttctattccacaaaaccgccattgtcatcatggcccgttctcaatgagctgttgggtacacctcccagacggggtggtggccgggcagaggggctcctcacttcccagtaggggcggccaggcagaggcgcccctcacctcccggacggggcggctggccgggtggggggctgaaccccccacctccctcccggacggggcggctggcctggcgggggctgacccccacctccctcccggacggggtggctgccgggcggagacgctcctcacttcccagacggggtggctgccgggcggaggggctcctcacttctcagacggggcggttgccaggcagagggtctcctcacttcccagacggggtggctgccgggcagaggggctcctcacttctcagatggggcggctgccgggcggaggggctcctcccttctcagatggggcggttgccaggcagagggtctcctcacttctcagacggggcggccgggcagagacgctcctcacctcccagacggggtcgcggccgggcagaggcactcctcacatcccagatggggtggcggggcagaggcgctccccacatctcagaagatgggcagtcgggcagagatgctcctcacttcctagatgggatggcggccgggaagaggtgctcctcacttcctagatgggatggcggccgggcagagacgctcctcactttccagactgggcagccaggcagaggggctcctcacatcccagacgatgggcggccaggcagagacgctcctcacttcccagacggggtggcagccgggcagaggctgcagtctcggcactttgggaggccaaggcaggcggctgggatgtggaggttgtagcgagccgagatcacgccactgcactccagcctgggcaccattgagcgctgagtgaactagactccgtctgcaatcccggcacctcgggaggccgaggctggcggatcactcgcggtcaggagctggagaccagcccggccaacacagcgaaaccccgtctccaccaaaaaaatacgaaaaccagtcaggcgtggtggcgcgcacctgcaattgcaggcactcggcaggctgaggcaggagaatcaggcagggaggttgcagtgagccgagatggcagcagtacagtccagcttcggctcggcatcagagggagaccgtggaaagaggggagggggagggggagggagagggagcgaagttttgaaggaaggtcagaattacttatgtattaaatgtggaagatgaaggagagagaagctggggctggctcccaggtttgtagctggagtacctagttgcagggaggagccatctactgagttggagaagtctgaggaggaacaagctttggaagaaagtaaaggttttgaatatggacatggtttaatatgcctaggaggcgctgaagtagagatgtgaaaatagtgggatatgagagtttggaatccagactcctaggtggttctagatgttctttaaatccaataggagtagatgagattactcagacacagtatacagtggggagaaaaaagagcctagaacttaattttgaggagattcattacttatgagtcagcagctgctgttgaaccagcaggaaaccagggcagtgtcacagaagcagggaaacaagcttctgaaagctcaagttgctcagccttgaggagtgctaccaaggtctgaagcaaggaacgtgggtggccagctctccgggcttacttgggacagttctggtttggatttgttgtttgagcacagttatcatcaaaaatactctagtttgttggttaattatatggtcaccctgaagatgatgctagaaaggtccgtttggcaatgggaaggttattgatgacattggtaaaagccttttcagttgagtcatggggcaaatagcaagttgaagttaaagggaatgttaacaaaccatagctgttaaatacttgagcattttttgtattgttctctatacgtttctgtacatttgaaatattgtacttaaaaatcatgcatgagagttgataaagtagagacagaatgtaggcaagtcttcaagaaatcttgctctgaaagggaacaaaagaactagggagagtcaatttggttataagctcttaaagtatatatggaaatactcagttatttagaaagaggttgatagaaatttattccatgagccctaaaaggccatcagataaaccagagggcaactgcctaagaaaaatacaatcagtacagcagcctgtgtggctgtcttttagtgtctaaaatgcaatgctaaaatgcagttcagcaaaagcaatttacctaagggtcaaggcagaattctcacctttctttttctttaaattacagaaaaggcctaacacgttccagctcctctacgaaactttcctgttttagcctttgttgaactcaaatatcatgccttgttgggaccatggcatttacttttctaatagctgttcttcaatttctgttcagaagtgattcatgtgggttctctgtccctaactatattagaatctccttgagtacagaattcatgagtgcatgctgcttttatactctttgctaccctagtgcacttactcaatgcttctaactcattcatggcagtgcccatttggctcctgagaattggattagtgcctaagacagagtggtgggtactttgggttcgccatacagtgtgagtttgctgaacacctcttgctttgatgattagtgtgggtttttcttggctttgtttttacagagtacagcgcctgaggaggagcatgagagtccccgagctgaaactcccagcactgtcactgaggttgacatggatctggacagctatcagattgcgttggaggaagtgctgacctggttgctttctgctgaggacactttccaggagcaggatgatatttctgatgatgttgaagaagtcaaagaccagtttgcaacccatgaagtaaatatctgtagtttcttagcagggtgtgtcccccacgggacctgagccttaatcagggactctactctcctatttgttatctactgaattctgttctttggaaaggtcaatggtttatttcaggaactgtgatatttaaatagtgctttgtcacaaaattggtatgggtgattaaactgtgcctcagaattagattttagattttagtctccttgtgtgttttggagagccactgatgaaaatcattgcatagtactgctcagttctgaagtgcattgttatatttcaaaagcaaacgagtgaaccaatacaccaaatctttaagatttgagtgttccctaggaaatgattattctttttaattgcatgattaagcaaatgtcatacccagggttcctgtattttttcatatcataaaagtttcctgctcctttgaggacatactatattgcagcatagtgaatttcactatatggagatttcttttggttaaatttttcttttgtatagttatgtgaattgacagatcttatttgttgttttggatagaaaataatataagtggtaatatctcttaaacagttcctcttgggtgagtatggtattttattttatatatatatttatatatataataaataaatatatatttatatataaatatatataaataaaaataaatatatattttattttatatataaataaaatatataaataaatatatataaataaaatatataaatatttttatatataatctatttatatattatatatgtatatgtatatgtgtgtgtatatatatatatttataatttttttttttttaacagagtcttactctgtcacccaggctggagtgcagtggcacaatcttggctcactgcaacttctacctcctggcttcaagtgattctcctgcatcagcctcccaagtagctgggactgcaaacatgtgccaccacgcccggctaattttttgtgtttttagttagagacggggtttcaccttgttgtccaggctggtcttgaactcctggcctaggtgatccacctgcctcagcctcccaaaatgctgggattataggtgtgagccaccacacccagccttttattttatttatttagaattccatgttcatgatctatgagtagcatagtcagcatttactttaaaatagctggtattatcagatgcatcattgcttgctttgagctatttctcttttaacttatggcaggtgtttattcctattttcagagattaaaaaatgtggtcaatgtctattttatttgcgctctactaggctacctttttctgcatcactgacatttaggttaggcattagcaatttgttcagtcttccttttttttttttgcactgagtagctcacaaattataacaatgtccctttctaggcttttatgatggaactgactgcacaccagagcagtgtgggcagcgtcctgcaggcaggcaaccaactgataacacaaggaactctgtcagacgaagaagaatttgagattcaggaacagatgaccctgctgaatgctagatgggaggctcttagggtggagagtatggacagacagtcccggtgagtggaaagccaagaaatgcacttaattccacaggctgctttgcacagttgagctctagtagatgtctgcatgtctgtgaaagcgagatgattacagaacttgccttggaaaagtaagactcttttctacgggtaatattgctggaattctgcatgatctttgtttcccctttgatgtgttagccacaccaaaagataaaagttggaatacagaatttaacaaaaaggaaaaagaggataggcatggtggctcatgcctgtaatcccagcacttgggaggccaacgcggatggatcacttgaggccaggagtttgagaccagcctgggcgacatggcgaaactccgtctctactaaaaatacaaaaattagctgggcatggtgggccatgcctgtaatcctagctacttgggaggttgaggtatgaggatcgcttgaactcaggagacagagattgcagtgagctgagattcagccactgcactccagcctgggtaacaaagtgagactgtctccaaaaaaaggaaaagacatttcataggggcagttacttatttgcaatgttaagattagctaaacattaacttggtgtgaagacaggactatggagtattgatctacttttccattttgtgacttttattttaaagctttctcatggtttattttatttcatgtattgtgtcttaaggagcaaactgcattcattgccacttccacctatttaataagcaggaattcctgattgaagaaacaatgattctgatatgaatacagggtgctgctttttgcattctttgtctgcatttaatgaactccatttaggacaaaataaaagtttactttcctggcttctatatttaaagactaaatgctaccttgaatgtttagacaagggtgtcttcccttgccctgtatctccggtgcccagaatgtatatttgactttgcaaagggaaaaggcttgtaggaataatgctgtgttccccacggacaggctgcacgatgtgctgatggaactgcagaagaagcaactgcagcagctctccgcctggttaacactcacagaggagcgcattcagaagatggaaacttgccccctggatgatgatgtaaaatctctacaaaagctgctagaagaacataaagtaaatctgtctcatatttcttcgataccttatcaaatatgaaagagcagcacttagcatctcagaggctgatgacatctatcgttaacatgaagttgggacacttcttcagggttgtcttcatttagcagctcacagggtggaattgatagagatgagacttttctgagccagggataaaagggcacggtaaaattttatatgtgatgtgcagttttcttttgaaagtacatagctttcatacaactggagaagggttcttttggccctctaagtggctaagaacccaagcatgttggcgttcacatggtgtgtgggtgaagagcaaattcttcgtctatgattcaggaaagcgtcaggcattaagttaggaaccaaaattgggtgggcaatttaatttggtcacaagtctaggagataaacttttcatagtcaagataaggaaagatagaataaaatatgctctctgtaaattgaagacttttattgatcagtgaaacattgaggtaactaatatgtaaaactttaggaatacattaaacacaactctgagaagcatttgagaacactattgatagtatttaaataaattttctttctttctttcttttttttgagatggagtcttgctctgtcacccaggctggagggcaatggcaaaatctcagctcactgcaccctctgcctcctgggttcaagtgattctcccacctcagtctcccaagtagctgggactacaggcgtgtgccaccacacccagctaattttttgtattttttgtatttttagtaaagtcagggtttcaccatgttggccaggctggtcttgaactcctgacctcaagtgatccgcctgccttgggttcccaaagtgctgggattacaggtgtgagccaccatgcccagcctataaattttctatacacatgtatccaatgactatgctcttcccatggaaaaggcgagagaatctaaggtgtccatacttctttaactgctttattgggtagctaatcagagtaacttttgactatcgtgtagcattctacttatctctttatactgtcctacactagataaaatgatctctgacttggtttatttaagctctggacttttttgctttaccacttctacatttttgtattaattcctagtatggacactcaactcctttatgctataaattctgagggagggccagaacttgaataaaagtggtgatatctccatttgcagtctgttataacactgcatcctcaaactgcctttgttgataatggaatgtaaagatgtataataggattagtttcattagtagaacagttagggtaatgattggaaatttaaatatgatgcctcattaactgtccttaattactattgacaactgagtgcgttttaaataggtaaatgtgaaagtagaaataatggtttatcttaatttttttctctagagtttgcaaagtgatcttgaggctgaacaggtgaaagtaaattcactaactcacatggtggtcattgttgatgaaaacagtggtgagagtgctacagctatcctagaagaccagttacaggtaagagtgctgtaaagttggataatcctgagggacctgtggtctgagacccaattacatattgcccttgttcttcatgtcctttctcattctttatccagaagggtagaaaaacctacctttgattgtacttctcagttggggttctacagtgtgtgggctacaggagtacccaggtattgattcctttacttcagctcttggggtgaatggatggggctggttgcagtccccagcttccttgtgcataatgacaagatttggaagcacagtgtattagtccgttttcacactgctgataaagacatacctgagactgggaagaaaaagaggtttaagggacttacagttccatgtggctggggagacctcacaatcatggtggaagggaaggaggagcaagccacattttatatggatggtggcaggcaaagagagggagcttgtgcagggaaactcctttttttaaaaccatcagacctcgtgagacttactcactatcacaagaacagcaagagagagacctgcgcccatgaatcaattacctcccactgggttcctcacttaaaatgtgggaattgtgggagttacaattcaagatgagacttggatggggacacaagcaaaccatatcattccacccctggcctctcccaaatcttatgtcctcacatttcacaaccaatcatgctttcccaacagtacccccaaagtcttaactcatttcagcattaactcaaaagtccacagtccaaagtctcatctgagacaaggcaagtcccttccgcctatgagcctgcaaagtcaaaagcaagttagttacttcctagctacaatgggggcacaggcaaagagtaaatacatctgttccaaatgggagaaactggccaaaacaaaagggctacagtccccattcaagtatggaatacggtggggtagtcaaatcttaaagcttcaaaatgatctcctttgacttcatgtttcacatccaggtcacgcctatgcaagaggtaggttcccatggtcttgggcagtgctgcctctgtggctttgcgggaaatagccccctcctggctgctttcatgggtcagtgttgagtgtctgcggcttttccaggtgcatagtgcaagctgtcagtggatctaccaccctggggtctggaggacagtggccgtcttctcacagctccactaggtggtgccacagtagggactctgtttgggccacatttcccttctgcactgccctagcagaggttctccatgagagccccacctctgcagcaaacttctgcctggacatccacgtgtttccatacatcctctgaaatctaggtggatgttcccaaacctcaattcttgacttctgtgtacccgcaggctcaacaccacatggaagctgccaaggcttgtggcttgcacctttgccatggcctgagctgtacctttgccccttttagtcatggctggagcagctgggatgcagggcaccaagtacctagccacaaggcacggggaccctgagcccagcccacaaaaccattttttcctcctaggcctctgggcttgtgatgggaggggctgatgtgaagacctctgacatgcctggagatgttttccgcattgtcttggtgattaacttttgcctctttgttacttatgcaaatttctgcagccagcttgaatttctcctcagaaaatgagattttcttttctattgcattgtcaggctgcaaatttctcaaacttttatgatctgtttcctttataaaactgaatgcctttaacagcacccaagtcatctcctgaatgctttgctgcttagaaatttcttccacaggtaccctaaattttcccacatttttctgtcttcttctgagctctccaaatgtttccaacctctgcctgttaccgagttccaaagtcacttctacattttagggtatcttttcaacagcaccccactctactggtaccgatttactatattagtccattttcatgctgctgataaaaacatacctgagactgggaagaaaaagaggtttaatggacttacagttccacatcgttggggaggcctcacaatcatggcagaagggaaggaggagcaagtcacgatttacatgcatggtggcaggcaaagagagagagcttgtgcagggaaactcccttttgtaaaaccatcagatctcgtgagacttattcactataatgagaacagcatgggaaagatctgcccccatgcttcaattacctcccaccaagttcctctcaaaaaatgtgagaactgtggtagttataatgcaagatgagatttggatggagacacaggcaaaccatatcacacaggagctgatcttattaagtgatccactgacttcttctcagaagcacttgaggagcttgttaaaatgtagattcctaggctctacccactacctaaatctaggtgagggagggatgcagtgaatttgcaatgtaagaaaaatcatgtgcatagtaaagtttgagaatttcacctagtaggattcaatatctcagtgttttcggtagattaatatgtgaatttcaacaacagttttggaaacctcccaaaattgcttctttttgcacaaaggcaatagtgtatctttacaagtctttaacagataaatttattggtatttcatttgaacaatacttggattttctggtaagacgttgccaatttatttaaatatgatgcctcattaagtgaggcaatccaaactgtaatttcatcacgtgaggtccttttgcttttgtgatatttaaagtcagccagaggttctaagacttgtatgcagtagttagttattataacctgagagctaagtattcatgccttgactatttagcagtaaggaatctgagattcagagaggttaagtagtcctcctgagatttaaatagacaatgagttatcatgctgagactggaaatctatcttctggctcttaagttttctccccctttgtactatgaaaagcttattctcatattaagtatcaaaatagtataatatgaattaaataattcttgttcacatgtatatagtacaaaaataaattttaacatttgttaatcattatttgtaaaattgtaataaaatgattttgggagaaaataatcatgaagagtgattttttataattaataaaatttatttagtattgctgatactagtaagattctattgctaatttatgtaacttatggggaatttttttatggatcacataatgtaaacagaacaaatcatttgatttttttattgtctcataaaaattctcttattcaaaacaggttttataagttaaacatttttcataattttggtaccacagatgaaaattttcttggcatgtaaaagagagttaaggaatataacagacatgctggtttttttagctaaaaatttgaaaaatttgaagcacaaaaagtagatatgtttgttttattttttaataatatgtaaaaatgtcatattctcataaaaaccacaatgaaatagaaagagcaggtttggagtcaaagattcagaggatacagttctattatgttagtttctagctatgtgaaatcatttgttcaattctatggaaattagtttttctgattcatacatttctaggcctagtctgttattttaaagcaatttttataaaaatactttttataagttgttattctataataaagaacaatggaaatcatgaatttcttcaaggattgtgataactctctcttaaggctgtgttgacaaaggatggtttctcctttttctagaaacttggtgagcgctggacagcagtatgccgttggactgaagaacgctggaataggttacaagaaatcaatatattgtggcaggaattattggaagaacaggtatgaaactgttttccataaggggcaaaataaatggtgaaaagtaacccatcttttattgtgactttagaataaagttgccttgtttacttttctttgaaaggaaaatatataaataattattttaaagatcaaatttctatccagtttataactgatcatgaagcttattcacagagattgtgtcatttggctccattaatttgacctgttttcattacttggaatgttagtacttagaagatatgctattttcatgatttgtttgacatcatagttattagtggatttgtgttgggtgatgtatttgaatttgtatcaacacaatgcctagcatataatttgtgctcagtaaataatgagtaatgaatccactcaacacactgtgaactttaattccctagattttttcttgatttttaacaagtattgaaattaatgagaaaatattatttagtcacacctttgatttaacactggattaattgcatattttttccactaagtgttatcacagcaaatgaatctgttgtacaaagctgccaccttaatttttcaataggactggtggctctttgcctgttctctgtctttccagaaaagcaaccattgaaacaaaatacaaataaacaaaacttttctccccaaatgccaaacagttgtggtttaaaaaataagtagatactggccgggcagggtggctcacgcctgtaatcccagcactttgggaggctgaggcaggtggatcacttgaagtcaggagttcaagactagcccggccaacatagtgaaaccccgtctccactaaaaatataaaaataagccaggtgtggcggtgggtgcctgtaatcccagctactcaggaggctgaggcaggagaattgctggaacccaggaggcagaggttgcagtgagccgagactgtgccactgcactccagcctgggagacaagagcgagactccctctcaaaaaaaaaaaaaaaaaagcaaatactctattcccacatctctcagtgtccattttgattcttttaaatgcatttcatttccatctataagaagcaactatattctcttcaggggaaaaaactcaagtgtgtgatgttttgtggcttactaaatatggtggcagatagttgcagaatttgtccaaatataaattgttaatgactacttccccccccgccctcaatctgtggtcagatttttcttattaggaatcacaaaagggacctgattctgatttatgaaatgtttacatttcatgttacaaatatttacatttcactttataaatatttatgtttattgtgaaccttgtatttaggccaaaaagtctcagaatagttaaaattttacttcaataatgacagtagaaaggctgggcgcggtggatcacgcttgtaatcccagcactttgggaggccgaggcgggcagatcacttgaggtcagaccaacatgttgaaacctgtctctactaaaaatgcaaaaaattagccaggcctgcagtgggcacctgtaatcccagccactcaggaggctatggaggcaggagaattgcttgaacccaggaagcagaggttgcagtgatccgagatggcaccactgcactccagtctgggtgacagagtgagactctgtctcaaaaaataaaaataatagtaatagtaataattgcagtagaagacatcgattgctagagaaaaccattgtgttactcttctatccagtaaagtaattgcaaatttggaaataattttaatttgatgataaaaaacagtttaaaaatagagtgctagtatttcagtcacttgtaccactttaggttttaaactgacctttcatcgtgttctataatgatctgacattttaactataccttttgtgtgtgtgtgtgtactgtctacatgttctgtctgatggcatcattatttatgtgcatatcttaccagcctcactagactgaggacagtatccattggggggtgaaatatagaggcaaggaatagttgttaaatatttaattcataaataaaattgctgagaaagaattgattccgttgcaaatacagaaccaagttgttttcctccctactaaatagaaaagggtttccaccctaaatgctacattttgggagaaattatcacaatgtagctacggttgttttccatcccttcttcaggattatctctctacatgactgaatatcctctgcttagaaaacacacattgttgtccaatgaagttgaaaaatctttatatgggctttgggtgctcttcagactccctcctttaatcataattgctgttgaaccttgaatgctagtgtggatttcctacatgatgccatggaaaacactggttttggggtgtggaccctggacccagctctgccattaactatccaagtgatctgggacatgtaacttgacttctctttccttcctttctaaaatgaggggctgggacaagacaatctccgagcttacttctgcctctaggaagttgtaatgtaattcctttggagacttgcatagttggattttcccttttccctccacctatctccttgagaattaggtttagttccctaggtatgaggctaatgtctgattgttctgttacaaatctgagaaggataatattttaaagaaaggtatctttctgggtcatttgtgcctcagacttaggtgtttgaaggccttcttatccccatgtaagggtgaagcctctaataaaataaaagttagaaatttggatgcatgatttaattgaattaccaaatgattttgcagataaagttcaacttttgttattacttgtagtgcttgttgaaagcttggttaaccgaaaaagaagaggctttaaataaagtccagacaagcaacttcaaagaccaaaaggaactaagtgtcagtgttcgacgtctggctgtaagtgatggggttgtcagcatctgtgttgtaagcctatgatatcttaatgttttatagctaatggttagtagaatttagtgaatgcagattacagctcattacctagcattagactgctgccctgtaacaatctggaaccacgagtcttaccttttagcatagtgaactgcaaagcatgtacattttactataaaagatacatgtttaaaatttttggctggggaacagaaagacaaagtcctgttaaaaagagtcatctaataaatatctgaaatactagattttgaaggaagacatggaaatgaagcgtcaaacattggatcagctgagtgagattggccaggatgtgggacaattacttgataattccaaggcatctaagaagatcaacagtgactcagaggaactgactcaaagatgggattctttggttcagagactagaagattcctccaaccaggtactttttgatttggatcatatgttgtgccatgaagtaaacatttaaaatttaaatgttcaggttagttttaatttgtatgaaataaactaaaaagttgtttccttacacctgatgaaaaattgacatgtgaaaatcaccttcagttttctaaagtaagttttaatagattatcttaatatcctataatttaatttatagtaactgattatacttagccaataaataatcttaacatcttaaatcttaagtaatcttattaatcttaaaaatattttaatgaattagtcaaacataaaacattggtttgtagacagatattcttagcagcattatttataatagccaaaaagtggaacaactcaaatatccatacacagatgaatggataaacaaaatgtggtgtatgcatacaatattatctgataatacaaaagaacgaagtattgacacatgctacaacatagatgaaccttgaaaacactatgctaagtataagaagccaatcgcaagattatatacgctatgattccattcataggaaatgtccacaaggggaaaatccacagagatagaaagtaaatgcatggttgccactggtgggagtggggaatggggagtgttggtttatggctatgggatttctttttggggtgataaaatgttctggagacagactgtgaggatgattatacaactgtataaatgtgctaataaccattaaattgtgtatttcaaagaaagaattttatagcatgtgaattacatctcaatgaagctgttataaacattgaaattttggatggcttttatttcaggtgactcaggctgtagcaaagctggggatgtctcagattcctcagaaggaccttttggagactgttcgtgtaagagaacaagcaattacaaaaaaatctaagcaggaactgcctcctcctcctcccccaaagaagagacagatccatgtggatattgaagctaagaaaaagtgagaagagatagagaaattgttcaaatccaatattgcacatactatattttctacttggtgcctattttgtactaatcattaatcataggcaaatctagacataataagtattattattatgaaaagtcaactactgaaccactcactgcccctgtcttctgaatattctacttggcactagctaagcatccaaattttcttggatgattttatttatcctgtgttcaattgggagaactttgtgatcgaagctttctttcttcctttcccattattctccttggaaggatatgattgtccatgactgtctttttattctttctttcactgtcacaactcgacagtgacctcctcagtctttgaatatagcttccccagtttttattgtcagaaagtgcaggggatccttaaccattcctattaacatggtttccagacccttttatatcttctgtctgctctagaaaccactattggtttgccttaaaatggactaccccaataatcgagggccttaaatgactgcttaatgcagtgcctagtttaaaatatatgcttaaaaaatggcagctcatttccacttctcttcccctggtgctgctgtggtggtggtttttaccagctcgcggtacagtggacagtcatttcctagaatgtagacacctgttcctgtgacctgcgatcattgcatcactcttgcccatattgagagcagatgctgactgagtctccaaggtcattggaaacgtgcgatttttagatggccgtctcttctctgaaatattaaatagaaagctgctgttaagatgacaggaggaacatatccctgtttgagcaataccttgaccccagatatttatctagagcatcacaaaatccctcacattttacagggaaaatctaccttgatgaaaagataaaatattcatagttcaccagaaacactttaagcaaagtttctcacaagaatcagcaataacgacttgtgccactgcttaatgtatcgagaagctctgtggggagggtactagttaagaagacagtcttggtttgaatcccagcctcaccctttgttagctttgtgacatgggacagttactgaaaacctctgtgagctcagtaccttcatctctaaaggggataataatagtgtatactttttagggtgctggtgaggattccttgagttaataatagacataaaacacttagaaaggggccgggtagaaggccagcaatcagtgatcgtgactcctcttgttcctccttgctgtggttttgaccaaccttctcaacacctctcaaacctgtcctttcgtcttccttcccactgttactatcttagttgtgactcccgttgctttcacagcctgttctcgactcgtctctctttaatgccttctcctcagtgaacactaaaggataaatagaatcatgtcagttccatgcatagaactctcccttggctctcaactgcctttgggttaagtccaaactccttaatatgtcctgcagggccttcttgtagctggtccatgtgattcttggccacatcgtcaattgtccctcccttgtgagttcagtactcattattccagacacgcctaactaatacttgcagtttgcaaaatgtgatcttccctttctctgctttcccttggcaagggaaactcctcagtgtaatgctgttgttctcctttaggaagccatccatgccccaattggattagaagccactcctgtgaattcctggaattagcacctagcaaattcttttgttattgcctgttactttccattgcttactagactagaagctccttgggagctgagatttgtatctggttcactttcatatcaagagcccagcccagtgcctgacatttagtaaggctcaatcattacatattgaacaaaagaagatgttaactttagtaatgtctgtacttgttctttgctgattatctaaccaactctggtttttattatctataagcatttataaaaatacaagtgattccttataaaggtgaaaattgttttaatatgtaaagttttaaaaatttttatttaaggccaggcatggtgggtcatgactgtaatcacagcactttgggaggccaaggcgggccgatcatgaggtcagcctggccaacatggtgaaactctgtctctactaaaaatacaaaaattagctgggtgtggtggtgggcacctataatcctagctactcgggaggctgaggcaggagaatcctttgaatctggaggcggaggttgcagtgagccgagatcgtgccattgcactcaagcctgggtgacagggcgagactccatctcgaaacaacaacaacaacaacaaattatttaattattttcttcaattgtttattaaccctataatattattactcttttcatacttttagttgtaaatatatgatctcattttgcatggttaccctatttctgggttgctgtttttgggggagtgataaaaagacatattcctgatgagcatttgagttgctctttctggagtcaagtaaaacagtagaaggaaacatgacaaatggtcacctctgaatcttcaaacaggtttgatgctataagtgcagagctgttgaactggattttgaaatggaaaactgccattcagaccacagagataaaagagtatatgaagatgcaagacacttccgaaatgaaaaagaagttgaaggtaaaaaacataaaccacatatatcctagtgcataaaatagttcatcatgctggattttctgctggcataaagacattatggaattcaaaagcctcctgtaaaataaatgtaggcagaaggtagcttttagtacattgtagtgaattttgaatccattcatgctagctgtcatcagatccctatttggaggacgttttttttttttcatctttgtcagtcactgagatgtacagtgaggaatacttcttatggtgatccagttagtggtactactttttagttagtttagatcacccttaatctggtatctaataatttatgactctatattaacattatgctgaagatgttttgccttcggaatacaacaaactattttaaatcaaaaagtgtattcaatatattttctttagagttgtaaaaaataaatacaattaaaaggtgtgggatcttagccctgccgctttccatgcttatgtgtgtttctgaagagtgtgatgggaacttgcagagcttttttgtcctgggtgctcatacgtctcctacacattactgcattaactatttgggcacctgggtagagaatctatagtctagtctcctgccatcttaagaggtagcaaaaaatcaacttgtaaaaagtagataattgcctttttctccagttcgatggtgacttttacattgatctttagttagacaaaataaacggtgtttcttagagtctcttactaatattccttgatctttgactataagaaggttgttctacctagtcacagtaaactttgtgaaaatcaaagtaggatagctgaatttatttgatagcacttacatgtaaacaatttagaattgggattcttctctggattgtctggttgaagtaatatgggttgctcagaagttgtgattgtgttatgatggatactatttgaatagtatataaatatgaataatatataaatatcagttggggatggaggaatgagagaaaattcaaataccgagttgtgtgcacatatagttgtgtttttgtgtgtatacatgattttacttgcttcattcttactagttctggaaagaattttgtcttgggagtatcaaactatagagataaaaaaaataatgaaattaggagccattcctcaacataaagaacaaaatgtgggttgggcttgccatggctcacgcttataattccagcacaaggcaggaggattgcttgagcccaggagtttgagaccagcctgggcaccatagggagacccccgtctctacaaaaagtaaaaaaaaaaaaaaatttgtggggcgtgagcttgcacttgtaactccaactactcgggaggctgagataggaggatcctttgagcccaggaggttgaggctgcagtgagccatgattgtgccactgcaccccagcctgggtgacagagtgacaacctgcctcaaagaaaaaaaaaaaaaaaaggaacaaaatgctttggtttgggttctaaagcatatttactattttcattatttaaaaattatgtatgaaatatgattgtgcttgaagtttgcattgaaccctagacttaatataacccaaacaaataatactgagcctcaaaatatttctatccattttttctgttttctttcttttgagatgggagttttgctctgttgcccaggctggagtgcagtggtgcaatctcggctccctgcaacctctgcctcccgggttcaagcaattctcatgcctaagcctcctgagcagctgggattataggcacacgccaccacgcttggctaatttttgtatttttagtagagttggggtttcaccatgttggccagactggtctcaaactcctgacctctagtgatccacccccctcagccttccaaagtgttgggattacaggtgtgagccaccatgcccagcctatccttttttcttgttagttaatttttgttcaacaacttctgtcataacacattcaattcttttgactcaaaccattatttttatggcatggcgtactcagggtatgtatgtgaatagatatcctggatctaaaacataattttaattatttccttctaataggagcttataattatgaggtacattttttttcttacaaaagaaaccaatgctttttagttgctatgattacgtttgaatttaccttttcagatttaaaaagaatgtaggagggccattcaacttaaacatttaaaacagcaacattatattgagaagaaagtttgcaatattcttatgttgggacttcatttgcaggcattagaaaaagaacagagagaaagaatccccagagcagatgaattaaaccaaactggacaaatccttgtggagcaaatgggaaaaggtaagatccttgatttttttcccctatatttttcagatggtggcatcgaataatattacagtttgccctattaaatattttgctttaatactcgaatcctcttttggctagataaatggttttcaaaaatgtttttaggcagcagaatctttaaaaatgaaattttattctgaagctgattgtaaaaaagcagataaaagcaaagttgttctgattttatatggggtcggggctggataccctgattagcagaacagttaaaacccactagcatagtatattttaaaactgtatcctttgggtttatatattgggaatttgtttgcagggtggtagcaaaagaaaactttacttggcaacatttgggaaacgaagttacgttaaattcattaagggtatttgatttttgataacttttaatgcattatatttatttactacagtatttttatagttaagtttgataaggtgttacttatatatgaaatttttaaatgctcccaagacttttttttttgctgtagctcccagtgactcagaataagctaaagattaatattcttgatgtgcagttttgcatatgaatctctctttgttctagagaaatgttgaaagacatttcttgcactccatgtacgttggtctaataatggtaagcactttggaaggctgctgtagctctccttgacacctgtacagatacctatacagaattaggaatattagtttgacaagaatcttaaaagcagtagcatttaattttttattgtttgactttttgttatggaaaatataactgtataaaagcaaatagaatactataatgaacttccttgtatcagttacctagtttagtaattgacaatattctgccattcttgaattatctatacctttactcgttcctcagcctctcaattattactatttttacagttttcttggaagtaaaatttacttacattgaaatacatgacttagctgtgctgttttgacaaatagatatacctgtgtaacctacacacacacatcactgtagaaaatttccatctttccagaaatttctcttttgggttagtcaccttcctccctccagaaaacaactgttcatgttgttttgaccttagattattttgcctccagcctttaacaaatatgtttatttatttagtatgtatactggatatgtgtatacacacacacacacaaacacacagaaacatatatacacacacaaacatatatagatatatacacatacacacaaaatatggaatgtataccatgtggacagtgtatgtccatttattttgaaattatgcaaatgtattatcaatccatttattattaataaatgttaatttctttctttaaataaattaaatagaatagtatttaatattttctttcaaaatccattctagcagattgtcttagttgtccttcctgtgggcatcccacttggaggttactctttccagtatttacttgaagagatccagagacacaaacagatgataacttcccttgagattcattcaataattataatgcattggatgttgaatttatttcctttacaagcatagattttttacttctacctcagcattgtacctggtgactctgactttatctgatgtgaatatgggataatttcttgaatctgtgtactgaatttactcccatttctgtcaggttttcagcagtgtggcagaattatgaagatgggggagacttgatgtagatgagaagttggtgcgaggtgatgttatagtgagaataacagtgattgggggaatgggcaaacttggattctcctgtccttttctagtttcttatccttgggaaagtcttggaacccttgtttctttgccttggtgtctggaaaatgagggagtttattagctgactcttagctgttagtttatcaggtgactattagtttattagctgactataggctttggtccataaaattctaccataaatgggtcctaaatagacacattctggacattgagttcacatgaaagtgctacttgcaaaaggccaaaggcaacactggagaatagttgacatggggcttttgtcacctaatgtatacttgcccaatttcataggaaaccttttatagtttgtattatcatgttttttcaagcattggtggaattagaaatgcattcattagaggaccctaattcttttttgttttaaagatgcatctattaaaaaattttttttaggacaacagtgggaagctgagaaatgggggagctgaactggataaagtctgtgtgttccagttcagttagggaggcatgtcaaattcttcagtaaaacccatatttgaataatcacgtcactgtttttctgaaaccagttccatcaaaaagcccaccatagccaattctgataggtctttcctgcctaatgcattttacataagttttgaggtatctcatagagcatagaaacaattttagaaaataaaatagcgtgaggctgggcgcagtggctcacacctgtaatcccagaactttgggaggccgaggtgggtgggtcacgaggtcaggagatcaacaccatcctgggcaacatggtgaaacctcgtctctactaaaaatacaaaaattagctgggcatggtggcacatgcctgtaatctcagttactcaggaggctgaggcaggagaatcgcttgaaccagggagtcggaggttgcagtgagctgagattgcaccactacactccagcctggtgacagagcaagactctgtctcaaaataataataataataataataataataataataataataataaataaaatagtgtgtttcatttgactttcatagctgatatacttggttttcttcgtttagcttatcttgttcctagagctcttcatctagtaaaatacagtagagtagttgggcatctggataatgtggctttatgaatcaatgcccattgtggttgcctaagcatataagcccaggaagtttggtgaaggtcctatgttttgtaaacgtttcccttgattccaatagtgatagactgagaagtgtaaagtcaagtgagactgagtggcaggaatgtgttctatgttctcccttttagacaattaataaagtgatcttctgttgattttgccttttgactagtcaccttctaagaactctgtgttttatagaaatagaaaattttaaactctggatctctgggagtaaaacaactatttttaaagacaatgtgcagttttccttttataagatgtaaattgtgtttgaatcattaccgggcatcactgtaaccagcaatatctcaggattagagaaagggagattcagatgtttaaaattggtttaaagaggcaaaatgaatggcttgtaagacattgtcagtgaaaaaataactgaagttgttttaaccgcccttgttcttgaagtgagcacctctttccagttttctagatgagtagtggtaattttccatctcagaaattttatttacctacttaattttcttccttgattagtatgaattgtccaacataaagatgatgtggctggtgttactattcctttgcctgcctagaatagaaatgatggggcaggggcatgacccatatctccattgttcatattgttaggaaaatggtgatttgttttgtatactctccccattaacaggggtaatgcagcatggcttgtggtgtgaatgctttgcttatgtctcatattctcttacctgagagatggtggtgaacagtgaacttctgcaattgacataggtgacacattcaaatgacagcatgatatgccctcatttatgattttcagtagacacagtgtattataaaaattttcaaagttgcattgtctgtggatcatacatgactttttgtttttatgcctttgttttttagttcaagctctcattatcctggattttgatcatatatgtttataaagcaggattgttttattgctttcctactcaataaaaatgtgaagccatccttttggtatgcatgttttcctccgaatagaaagattcctttgaagatttcccatactttttcatagtcattttagaggatttgaaggtattttagattaagggaaggactatgataaaacctattattatatatgactttattatttttaggaacattctctacttttcaaaaatatcggacaaataaaatgataagatttcagtaataaaaatggtggcattgttttccctgatgtgtttctaaagtagatcatcttattgctgcctcagtcttttggtatttgcttatttatgtgcaaggtctccagtgggcttgctgatgcttctagagcctggctgctggcttaatattcctgcactcaccaggttgcttcccagcataaggcatcctcgccattcattttttaatttatatgacactgtgctttggtcaccaagacctgagctgcctcctagtttttctagccagctttctttttttcttaggacaaagggtcttctttctgaagtcgggcctagacagatcaaggtagttgatcttatttcactggttcaggtgataaactagcagagtagaagcatggcatggatggaaacatatattatctagaaaaggcagtggctgaagttctactgatgtgcctgaatcgttattttaaaatgtctttcttctttgttcaaggaattgaaataaacatcattatttttaagtgcatcattataaatttttgttgttgtattaaaagggacttaagaaagtgatcattatgtgtgacattgcctcactattctgagtgttagaatgttcagaataaattcaagacacattttgtaatatatagactgtttgcttgtttttcatgtctgcatagaaggccttcctactgaagaaataaaaaatgttctggagaaggtttcatcagaatggaagaatgtatctcaacatttggaagatctagaaagaaagattcagctacaggaagatataaatgcttatttcaagcagcttgatgagcttgaaaaggtcatcaagacaaaggaggagtgggtaaaacacacttccatttctgaatcttcccggcagtccttgccaagcttgaaggattcctgtcaggtaaggagccaacggtctggaaagtggaggaattctatgtgcagttccagagttaaggagggcttctcgtatcatgaactttaagttaatgctgccctgattaacttcctgtgaggatgttcatcttcagtgagttgtgtgaccgtattttctcttccttagcgggaattgacaaatcttcttggccttcaccccaaaattgaaatggctcgtgcaagctgctcggccctgatgtctcagccttctgccccagattttgtccagcggggcttcgatagctttctgggccgctaccaagctgtacaagaggctgtagaggatcgtcaacaacatctagagaatggtaaacccaacaattttaaaatctcctgtctcagtttgccttaatgtaaacatgactcccaacatttagaacttgagtacacttgcttgctttgcaccaaccttctccattttcctttgtgcctgtattgttcaaagtcttaaagtcttctgtattcagattcttttccagattcacacctttttgtaaacatacaagcaagtttcacattctctaaaattgtgtcagtaggatataataataatttttttttttgtagctacaggatctcactctgtcacccaggctggagagcagtggtgcaatcatagctgcagtcttgacctcctgggtttcagtggtccttctgcctcagcctactgagtagctgggactacaggcatgcaccaccatgcctggctggttttttatttttagtagagccagggtctagctatgttgcccacgctggtctagaactcctgggctcaagtgatcttcccacctcagcctcccaaaataacaggtgtaagccattataacaggtgatataacagcctcccaaaataacaggtgttaggcaaaataacagatgttagcctcccaaaataccagggataacaggtgtcagccattgtacctgacctggatataatgatttttaaagattttttttttttttttttttgagaaacaggtgcaatttcttcctttggttgaggaggccacttaatatcattgctaggaggatcaaaatgaatgatcccttacttctgtttcctcaaaatagttaaagttttggcagtctcatactgtcttttaaaagaaatcatattccactgtcagattcagaaaaattttagagttcttacttttggaatacacttggttttggaaggttcactgttaaagattttgaaagctcatccctcctacgttacactatttacttcctagctgccatttgagttaggaactgtgttgcattgtgcattattttgtgaaatgcattgagcattgtgtgaaatgctccacatgtaacccagcctaacttcagcaattgtagattgtgtgatgactggaagtgtctgtatgtgtgcatgctaggcaaatgtgtcgtattgcctttcttctgaaagtgcatctggacagcatgtctttgttccttgaattcagttatgtgaaatatgtctttgagggtacctctttctccacttattggtacaagctgtgctttcacttttgacaaggatcagtaggcagtttaacttttgctgctagttggtttcacctctttgtgcttcaagagaactcacttcctttccacgcaagtgttacttctgtgatatttttacattagtgactgaggtagacactgttccagctggctgttcagtcattatttctcagggtacctgggcagcatggtggcagtatttccatataatctcctccactctggacctgggtttgtctacacggtggagcttacagcaagactggttgaagggatctttgttttcttttattctttgtgtagctgttaaggaagaggagattatatggaacaaaagggacattgttgttccatcttcagagagacatttcatcatgaagaaatgaagaaaaattatagtgggttagttaatatttcaaacgtcaacatccgcaggaatgaagtcactgtctgactctcagaaatgccaatggaatgatctatgttgttaattaacagagacccttttacattttaatcatggggtctcctttgccatgtattggaattcatttaggataatggtctatgtaataatattggttcctaatatgattttttcaaactaaatatttttaaataaacagaactgaagggccaacctggacatgcatatctggaaacattgaaaacactgaaagatgtgctaaatgattcagaaaataaggcccaggtgtctctgaatgtccttaatgatcttgccaaggtggagaaggccctgcaagaaaaaaaggtaacatatatcttccatgttagaactctagcgcttcttctaatatctcctcttacatattttgaaatgttttttcagagattaaaaaaaaagttggtcagttttgttcatcattggtgcaaaaatgtgtttatgatttgagggttagtttgacctcacataaaagaaagtacagttattaaaaattttttcatagaagaaaagcatattttctccttctgctgtgattagcttaaaattctcaacctgttcataaaatctgctaaaatatctttatgaaatgaggactatcagttgacgtgttgatgtatacttttttctgcatcgaataggaatgtttccgaggtcatttagttgagtagccttatggctctgtgctattagatgaaaaggagagcagccattgagcactgcacacttggcccacactgggtttgctgttcccttggtttttagggttgagaatacactgtattgcccacacacaactcatgaagaaaaagctttaatttttatgattatgcctatttttttcatgagtttttcatgttttgttttgttttgttttttgatttccaacttttattttaagttcaggggtacttgtgcaggatgtgcaggtttgttaaatgggtaaacgtgtgtcatggtagtttgctgcactacgtattaagcccagcatccattagctcttcttcctgatgctttccctcccaccatgccccaccctccaacagaccccagtgtgtgtttttccccaccatgtgtccgtatgttctcattattcagctcccacttataagtgagaatatgcggtatttttttttgttgtttctgaattagtttgccgaggataatggcttccagctccatccatatacctgcaaaggacatgatcttgttcctttttatggctgcatagtattccatggttgatatgtaccacattttctttaagtagtctatcattgatgggcatttgggttgattccttgtccttgctattgtgaattgtgctgcaatgaacatagtgtgcatatatctttataacagaatgatttgtattcctttgggtatatacccagtgagattgctgggtcaaatggcatttctggttttaggtctttgaggaatcaccacactgtcttccacagtggttgaactaattcacactcccacccactgttctttttagataaaaatgctttctaatgcattttaaagtgacttttgactttatatagcccattttactatatctgtgcagacacatttttgtgcatatttttaatcttttaaaactttttccagacccttgatgaaatccttgagaatcagaaacctgcattacataaacttgcagaagaaacaaaggctctggagaaaaatgttcatcctgatgtagaaaaattatataagcaagaatttgatgatgtgcaaggaaagtggaacaagctaaaggtcttggtttccaaagatctacatttgcttgaggaaattgctctcacactcagagcttttgaggtaaatccagaggccactgggagtttaagtttattacggggtaaatagtaattatcttataagattcacgtatttattatttaaatattttacattctttctagatccccatttattatgtatttaagttgggacttatcaaagatgtacttttaatgtgctagagagcacatttatttccttttgcctggaagcaaagtcaaaagtagagtaaactggaccttgaagataagagaaaattgcttaaaaatggtcaaaataatgtttcaggcatggagggcctgtgtgaaatacagactgttgattagattatagtagtaacttggttggggtggtagaaatagcccaggtagtagtaaattgctgaatacatgaaactactttttgcaggtttttgacatttgaagtcaaaagtcagagataggccattgacagtgtcagagtgggaaggcaaatcgttccagggacatgaaaattcagaaacaggatccttcactacacctgaaaatgttgacagatgcagcagtgataaagtttaagaggaaaggataaatgtgaggatgtataaggagagagtcaatgtcaatagaagtcagtgtcagattttaacattctgcctgtgagaaagatggagaagcagagtttccaggtcacctggtattttaataggaaagttctgggtggagaatgaaccaatcacactctctccctgcaaggcttcctatcctccagtgactccttaccttggtctttttttttttttttccccatcagtcagggatctttgtcttttttaaatttcttattcaccgatgtatgccaagatgtactcataactagagcaatgcctggcacagagaaggcatccaatcaatatttttcaacgaatgaaatgaaattagcaataggagatttagatttggatatatctctgtatatctatctatctatatatatagatagatagattctcttggaagctaaatccaaatatgtgtagatatatatctatatatatagggagatgtctctgtatatatgcatatacatctttatttatatagagagaatctaaatccgaatctatatatatttagatgtagatccaaatatatgtagatacaatatatatatctacatatatttggatctacatctaaatattatatctacatatatttggatctagatctaaatatatatagatttggatttagatgctaagcaaatttgcataaggaatattgcccccaaaaagtgaaaagattgaaagcgaagacaaaaattaatgaaaatgtatgttttgaaaatcaaagtcagagaacacgtggtagaagaggagctggaagacctcacagattagtgtggaagggatccagccagattctctgagtggaccactgaatttggaggggcgttctttgactcaggaactaatgggtagttccaatgaatgatcagcagaagatacagatggaggggttgtgtgtgtgtgtgggtagctgtgtgtgatggtagtgacaggaggtagtttttctctaggtgtaagtgcagttctagatggagatctcattcaaataaaccagtaattatggagagaaatgtgttttgtgtggcttagtgtttttgactcatttacttttttttttttgagatggagtcttgctctgttgccccaggctggagtgccatggtgcaatcttggcttactgcaacttcagcctcccgggttcaagcagttctcctgcctcagcctcctgattaactgggactacaggcacatgccactatgcccggctaaggttttatttttagtagagatgaggttttaccatgttggccaggctggtctcaaactcctgacctcaggtgatccaccctcctcggcctcccaaaatgctaggattacagacatgagccaccatgcctggcccattttactttgcgatggtcccacttctcgttgtgtattatgagttgcaattgttcccggctttcaaaatgagcattggccttttctataattctaaagtttttggttatggtcccagcattgtattatcagtgattctcaaccggggtgattttaccctccagaggatacttgttaatttctggaaacatttctgttgtcagaactgtgggagaagacttccagtgggtagaggccagggatgcagctaaacatcccaccatgtacaggacagcctcacaacaaaataatcatctggctccaaatgtcactagtgccaaagtttagcaatgccagatgaaacattccccatcttttcaaaagatcatccctttgttttcagatttaagtccaaagtataaatggagattaacctcagagttagtcttcttttgactcttaaaagtatatcttagggttagctaaatgtatgctactatttcaatatggagcttaaagagaataaatattctcccaaaatacaaaagagtcctgtggttatagtaatccagctttaagctttggtgggttgttgctattaatgtagcaaatccaggcactaaaagtggtcacttggaaatatttatttccattaaaaatatccaacatcaagggtgtgtgtctggatatgtaagtgtttgttgttacagtagcagatttgtaatgtccagtactttttttatttgcttcttgtgtactaactgcaagattgtggttaaggaatacagtgtctatatttcttaattgtataacttcttcattgaaatacatgttttatcttaaattcaaaagaaaactccttttttttgctttgtaggaattgctggttacttaactactcatgatttacttgggaaaactttaaattccacaccctcaaattattagataattataataaatatttatttgcagattatcattgttttccctttttcaatgacctgatatatgattttttaggcatttaattatttttgtctttaaggcatgaagcacagtaggttttagattcaatgccaattcataataatgttttgtaggaacaaaatagttaactcgtttatttttaaaatgcatttttcattacatgagtagtacttgaagcctacacattgtgaagaaattgaataccacagaaatacttacagtgaacatttagagttccttttcttccccaataccattttctttcctgggggcagctaatattaacagtggatccttgtacatacaagttagacaagaacaattgacaaatattgctaattccaatcattttcccccacactgtggaaagaaatgatattggaactctgtgaaggacatttaaatccatagtccagatagagtttggaagtgaatcccactacttaataacatctttcattgatacagcacatttaaactttgaaagtgttttcatggccatgtgcttgcttttttctgctatccttcaatatttgtaagaggctgttagttgtgtgcgaatttcagttttctgttatttgttggcattgcagtgtttttcctcatttgcctgcatttcctttgtctccatagctggttccttttgtgcatgttgagattggacctacatatttttattcattgtgttatgcccaaatacattcttaagttctttttatttgtgccatgccaaagcaataacctccattcctgtacttacgaggtaaaatattcattgttactttttacaaactactataccccttccaggtgacaaaacatttgaaaatacatgaaatgggtatttcttttttccattattgattttactgactggattttcatgtgaatcatggggataacatattataaaatcctaagaggctgcttatatatctctcctcaccagtagtaatatctttggatttaggggctgcaaagtatttcatattacgtacttccttttccttattcaagagctcctgccctatgtataactgggaaatgaaagatgtccccaaggcacacacaaaactgtcttctattttccagcgctcctgccttttcaggctcctcctccaggcccttccttctgggttcaggctctcatgcaatctctttccctgaaaatttcattaccctttaaatctgattcccacttcctgtctcttctctctggaattcatctttcacaccaataccagagttgtacttctgaaaggatctggttgtcttcaccattaatacaaattaataccaagtgccattaatacaaaatgtccctttcttgccctgaagccctccctgcatctccactgtgagctgagtcaggtggggagaatacggtgggtcaccaaagaccatcctagactattgcctttctctgaaaatgtcatgtacttgctaggaattcacatccctcctcctcctgtctgctcatctgtcttcagcccagctcatcactacacccatagctagataatcgttccctcctctgtgattcgactgtgtgtcatttacaccttcacaatgacccatctcaggccgtcttttattatggtgagaaatgtgtgtctctcttcccacgaggcatgagctctttgagggttggatccctgtcaggcatagagcaagttagcagatgtgaatgtaattgatgtgtccggcctctctagtgagagtggatttatacagtctaaagcctggttatcctaagtggcaggacacctgtgtagtcatgcctcttccttcaactgttgaacagtcaaaggcacacatgaatggacttgctctgacccggaatctggaggggggcgtgctggagctccaacaggcagaaccaggttttgagagtactttggaaagcattttagggtaaaaatgcaatactttctaagagtaatattagtacggatgatttaacccttcttaggtaacatataattgatataattatctcataagggtttgagttttttttctcatttgtgaacacattttactttactgaagggaatattcatatattcccttccttagatttaagaaccttattagtttttaataagtgtagtagcagtgtcattgtttgtcttccctactaagtgagagagcacattttcaaggttgtgtttttgaggttattgagtattataaagtgaaacaaaataggaacctggctgccttaaattactgttttaattctggcttcacactatttttttttttttctggtctatgtcttaaaaagctgtggacattccgacagatgggggaggagcaaaagaaaatgccaagaatttagctgtaatcaagtctccagaggtagttgtgtaccttgcaatcttactgtcttaaatccagatttaccaagctttaaattacctccatccttaggtcacaggatgggggatgggaaatgaggtgagatagggtcagaggaattgttttaatgaccttgctgttccttgtccgtgatcccatagcaggttgttgcccatctgaaatgcttagaaatcattgcttttgagcagtgatggtccatgtagactttgacccttccatactagaatatttgatattttgattttcaaaaaatactgtattcgtaattttatattcatttgaatatttgtgagtaaaaataggtatgagaaatggctgccccagattagtacttagtttatttttttttgcatgtgaaataatgacatttgctttagaaatttactaacagtttttatatttcgttttggtttgtaagaactgaagtcccttaaagaaatgtgtgtgtgtgtgtgtgtgtgtgcatgcgtgtgttctgtaagcagatggaggtgaagaaaaaaatcgtcattattgtagattagaagcttgtaagtgcatcagctgagtaatttttaaatggacagagaaacactattttcatgtgagctctttgacgatctttgtaatcaacctctttgttgtggtggaattgacttaaagatgagcagacttttggtatgtttgaaaagcacaggaaacatctgctacaggttgattgtgacaatattttgctcagggaaaggggagataagatagggagagtggaaggcagagtagagctccctgtcttctgccttcacccatacaggtacaggtggtaggtagcattgatctttgggacttgataacccttcccgcgcggtgtgccacgaggtggaaacgccgagtgaatctgctgctgccaggcacttctaaaggatgggcctttccttctgtaccaattccttcccatgagctgtatttggccaggtctagccagatatataagcagtagccatttgaaacagttactttgaaacagttacaggatagaacaagcattaatgttggcagcaattaaaaaagtgaaacccatgcttatgcaaacacatgctcatcctggctgttcattcctgtggtgcctctgatgggacataaacaccaaaacttggatgtggtaactcttttatggtctcaatcttggtcataataaagcagttggttttgtagatcttagtataataatcgctaccatttagtgcattcttctatgtgggagtctctgtttttcagaacaaccagacaagatagttgttatgattccagtttcacaatgagttattaaggctcaaagaaaaattagtttctcaaggccccatggctaggcaggtgctgagcttggtagtcagacctcagcatttctttatatgggcacactgtctcttttagagcacagtgtggttagaattacatgcaggatttttagtagtgaaaatattatagtgtggctttacaggttcccttctattccctttgtcacttttgggatgatccattggcctacatggcttctctgtctgtttctttcctttttttttttagtatttattgatcatttttgggtgtttctcggagagggggatttggcagggtcataggacaatagtggagggaaggtcagcagataaacatgtgaacaaaggtctctggttttcctaggcagagggccctgccgccttccgcagtgtttgtgtccctgggtacttgagattagggagtggtgatgactcttaacgagcatgctgccttcaagcatctgtttaacaaagcacatcttgcaccgcccttaatccatttaacccttagtggacacagcacatgttccagagagcacggggttgggggcaaggttatagaccaacagcatcccaaggcagaataatttttcttagtacagaacaaaatggagtctcctatgtccacttccttccacacaaacacagcaacaatccgatctctccttcttttccccacacttcccccccttctattccacaaaactgccatcgtcatcatggcccgttctcaatgagctgttgggtacacctcccagacggggtggcggccgggcagaggggttccccacttcccagatggggtggccgggcagaggcgccccccacctcccagacggggcggctgccgggcggagacgctcctcacttcccagatggggtggctgccgggcggaggggctcctcacttaccagatggggtggctgctgggcggaggggctcctcagttcccagacggggtcgcggccgggcagaggcgctcctcacatcccagatagggcggcggggcagagacgctccccacatcccagatgatgggcggccaggcagagatgctcctcacttcctagacaggatgacggccgggaagaggcgctcctcacttcccagactgggcggccgggcagagacgctcctcacttcttagacggggtggcggccgggcagaggctgcaatctcggcactttgggaggccaaagcaggcggctgggaggtggaggttgtagcgagccgagatcacgccactgcactccagcctgggcaacattgagcactgagtgagtgagactccgtctgcaatcccggtacctcgggaggccgaggctggcagatcactctcggtcaggaactggagaccagcccggccaacacggcgaaaccccgtctccaccaaaaaatacaaaaaccagtcaggcgtggcggcgcgcacctgcgatcccaggcactcggcaggctgaggcaggagaatcaggcagggaggttgcattgagccgagatggcggcaggacagtccagccttggctcggcatcagagggagaccgtgcaaaggggagagggagacgagggagggggagagggagggggagagggagggggagggggcgagggagggggagggggagagggagagggagagggatctgtttcttttctctttctttttttctcatgtcagagggagagaaggaacagatacatgtgaattgcatgtgccctgatgggtctgcgtgtattagagagagggtgggaaggagggaggagggaaggctgttgaggccataaaacttcctcatatgccagtgactggagtagttaaggccacttactcaagtcaaagccaattgtggttaaaacttccttgaaatataatgcttccatataaattttgaaaattttggctgaggagactatcagttttccttattcaaactagagttaatgaatttcccagttatacagcagtaatgcattctttaaaagtgcagaatggagattagcagtgcaagaatctgtggtgacaagttaaacggagaatttttaaagtcattttatgaactctgtgaatgtattcacactttctctctttttgcacttctgtcttttttggatgccccactctacccgtcctgagcatgtcttcccaagaagccttctatgctaagaccttgaaatgctggagcaaacacagaagtgacctgtaaccaactgaaaatatataagggtagcatggacctgtgggaatagtgtcagacaggctggagaagagaggaggaagcagcttggggaaagtgtgcaatggaactgaaaggctttcaaagctgtgccaagaataaacgagatgcagaagtgcttagacaggatggtataatattaatggaagacacagagaaacctagctagataagcactttttacttgccatcttcatcagagaatggccttcaaaactacaaagtatagaatagtcattactgagagtgctttagagcctgaacttaggaccacaagcaaaaccactcagagctcctccagatgcataaatctacatcccaagtgggatttttacccttgatctcagggtcatttacgtcataatcttgtgagaaattaccagaaaaatggagatggaggaatgtcctaattaagaggaaacattagtttttagaagcagaagatataaagtaagtttgatgtcagttcctagccaaactgtaagataaataaccgactagagatcttatatgtgcttaggaaagaatgtcgtggtcaccaggaatcaacatggataccaataataggccttgcccagactcatttcctttaagtactactttcttttctttttttttttttttggaggaggaagcctagattattagatacacagagtgataacatctcacatttgaagatgctctctcatttagttcaaataatgctcacaaatgaacattcttggcaagtcttgatttcaccaaagtatttgagataatctctgataaccttatataaactagttagatctttgtgatcaattcaaacattataaggatcagaatagttggttctgggtggcatattttaaggacattaaaaattgatgtagtttccagagcgtgttgatcagagtagtgagcaatacctaaatatcatgtcctacagacatcatggaaggaattgggaacatgtaatcagtagaagaccagagaaaaacatggcagttgcccacctatggaaagaaatgacaatgattttggtattggagctcaaaagctaaaattgcatctacttacttgcattttttttttttttttgagacagagtcttgctctgtcgccaggctggagtgtagtggtgccatcttggctcactgcaacctctgcttcccagtttcaagctattctcctgcctaagccaccccgagtagctgggactacaggtgccccaccacgcccccagctaatttttgtatttttaatagagacggggtttcaccttgttggccaggatggtcttgatctcttgacctcgtgatccgtagcctgggcctcctaaagtgctgggattacaagcgtgagccaccgtacctggcccttatttgcattctttaaggcctggttccaatgttaccttctctctaaagtctctttctctttgcaaaatgtttgctttcacatttgtctttgaacccctatcgccatacacagtagctggattttatatatatagtaggtgcttaataaatgttggatgaaatattggagctgaacggggactgtcttgagttctcagataaaaaggcatccaaaagcagaaatgagaaccatctattgtattccctctaccgtgctatttgtttattcctgctctgagttactaactttagagaaaaattgttctaaattatatcagagcaaaatattttatagctgataaaacctagaaatgcattttttccctgtaatttgcattttaaatcataactattgcttgcatttaagcaaaaagagctagcgtttggaaatttttagagtggttactaacctgtcatctcttgaggattttagtcaagaatgaagaaaataatcattttcaaatttggaaggtttagaaaaagaaataacataaatgaaagcgatgctatcggagctttaaaaagttcctttgttccagtggcggtagatcttgagatgtagtaggctgaacgtcacgaagtaatatccccctctgttatcatgttcgattaggccgattcaacagtcattgagaagtggatggatggcgtgaaagacttcttaatgaaacagcaggctgcccaaggagacgacgcaggtctacagaggcagttagaccagtgctctgtgagttctgctgatctggggaacttgtcataaataacattttgttctttttctatgttatttgctgctattattaaaattgtgagaatatagcatagcattacatctagataaaatatctttcatcataaagcttttatgactttatagctaataaaagaatgacagattcttcaagtttttatttctggacgtggttatagaattttgagaggttatagaatagagaacaagaacaattttggttcattaggagtcattgtatattgcatttcttgtgccacatggtgaggatttaagaaaaacatatttaacaaatgaatttgagaagtgtctgttcatcaaattcatttaagtatgtttttcttaaatcctcaccatgtggcacaagaaaagcaatatacaatgactccatgttgtgcacgtgtaccctagaacttaaagtgttaaaaaaacaaaaaacaagaaatgaatttgctagtaatagtgcatgcagtttatatttggtgaaatcatcaggcttctctacattaattaaaaggctattcccttctgagagtcaagtatttccagtctaatttggcagatggctatatcaagcacccaggtgaaatgagtttcttaaggcacaatatttcttaagtagttagaagtactgactcttaagcagtctgcttgtgtaatatttgcagggagataagcagacaaactataattatggcatccacttatatagtaatgaactcaacatgcatcttttatgtgtttaggcatttgttaatgaaatagaaacaattgaatcatctctgaaaaacatgaaggaaatagagactaatcttcgaagtggtccagttgctggaataaaaacttgggtgcagacaagactaggtgactaccaaactcaactggagaaacttagcaaggaggtgagtttttcaactttactacctacggttttcaggagatgtagactgtagcttctctcagctgactaaatgtattatgacccatccagtttgaaaaacgatggtctagaataactccagcatgggtagtgagctggggccaaaaaaaaaggcatcattttttaaattaagagagggtgctgattgtccagtttggctcagggcttatccattcttgtcttaaatctggcttgaaacacatttatgacacttgctttacccctaagacatttgagtgggaccatttatttacttagcaaatatttcttaatcagttgccacctgtcaagcatcattctaggcactgcaggtacagcattgaacaaggaagaagaaactcctcttaaggagcttacattctagtgaggcagatggataatgaataatatcatggaggagtagcaaggagttagggctaggtgggttatttcaaataggatggtcagggaaggactttctgagatggggatgtttgaataaagaactgagtaaagtaagagatgagccttgtaaggttcagataagaacattcaggcgtggagaatagcaggctttaaaactctgtggtgggaatgaacttggtctgtttaataaagaatgaaggcagtgtagctggaataaaacagagaggagttagtgagttggagaatgggaatatttgaggttagaggtaggcagaggatggattagctatggccttggaggaaaggacttgggatttatttcaagtatgatattacacagaaagcaattggaaggttttgaacagggaagtgacatgtgatatagatcttttaaggtcactctggctttttgttttgtttccttttttttagcaacagtatcttgttgtatcacccaggctggagtgcagtggcacaatcctagcttactgcagccttgaactcctgggctcaagcagtcctcctgcctcctgggtagctggaactatagatgttcaccactatgcctagataattttagaaatatttttgagccagatgcagtggtgcatgcttgtaatcccagtactttgggaggctgaggtgggtggattgcctgagctcaggagtttgagaccagcctgggcaacatggcaaaaccttatctctataaaaaatacaaaaattagccgggcatggtggtgtgcgcctatagtcccagctacttaggaggctgaggtgggaggatggcttgagcccaggggatggaggttgcagtgagctgagactgcaccactgcactccagcctgggcgaaagagccagatcctgtcttaaaaaaaaaacaaaaattgtagagatggggttcttagaggctgaggcaaaaggatggcttgaggtcagcagtttgagaccagatgccagtctggtcagatgctgctgacctcaagcaatcctcctgcctcagcctcccaaagcgtggagatcacaggcatgggccattgcactcggcctctctctggttttcatgtgaatagtttgctctgggaaggcaggaatgaaaacagaaagaattcttataaggttactgcaggcttggagagagaggatggacccatacactagggaggcttaacgaagtagtgatggagggcatgagaaatattaggtttgaaaataaagaagagacctaaggaaagaattggatgtgtgatagaagaaaaagtgaatggtcaaggatgactcaggatttttacaaagcttccactttgtgtgaattgtggtgtcatttactgcaataacgaaggagaagcttctgtgggtgtaggtgaaatgatgactaccattctggaagggttaaatttgatgctagaagctaaggaggaaaaatcagtaacggggaatgtggggtcccaaatgctaggtggagaaaacttttcacagggcctaatgctgaggattgcaggggccaatcaaaacagaaaatcgagctttaaatttgataagaaggaggcatttaataaccttgagaaagcagggtcaatgaactggtgggaaaaaagtcatagtggatagttcgaggagggtatgggaactgaggagctgggacaccaagcataaccaactttgagaaatttctgtcttcaggggagcagagaaatgggtgggtgctggtgatgggaatccaaagaggtggttttgttatttttaataatgagagatattaaatgagagatattaataagaggacctcactttagaaaaaaaatgatggtgcagaaagagattgagataggagaatttatcaagtgaagtctgtgattatgcgaggatgagatccaccgtctaagtgaagatgttgctagagatatggtttctccgtggtaatggaagggaggaaatgatatgggaacagtagaactgggaggtattctttcccaattgctttgatttttattagtggaataatagtgaggctatatatagctgaagtgagtgacaaagcagtgaaaaatagaagtcaatatgaaatataggcttaccccacagtcacgtaaatagtacgtatttcttaataaaatgcttttggctaatgtttgtatcagaaaaatttatatttgcataactgaatattttgctttgtgtttattgttttacccaacttattttgaacatgttcaaatgtaaagaaaagttaaagaatgataaaaaggaacagctgtatatccatccattcagagacttgctaatgttttaccacatttgctttctctctctctgcctttctctttatacacacacacacacacacacacacacacgcacacaccctttttttttggtacttttgaacagtaagttgaaaacatcatgacacttcacccctaaatactctagcatgattttccaagcatgaaggcattcttctgcaaaaccacaatactatgatcacacttaagaaactaataatgttatactctcatctcttatcctagctaaattcaaatttttctcaatgtgctataatctgatggcatgtgccttaaggaactggggtttttgaggaaatagaaaatggtttggaagtggcaatgaggatcaaggaaggtgataattagaagtttgtatctctatctatctatctatctatctatctatctatctatctatccatccatccacatacatatggtgacaaataattcattgtgaattactgattcaaaatacaggaataaatatatgggaaatttaaagtgtcctcaggaaggaggtaaccacatgtgtgaataattatctagagcatttccagactattgcattgcattgactagtacaaatgttgaagtagttttggacaaacataattttgccaaattttcattttgctaaaaagaacaggcatataaaacaaatcaacaaacaaagatagtctatttcatctattatattcatgatatcctgaaaaaaaggaacattttaatgccaaaaaatagaaagtatatattctcaggataattaaagataattttgagggtgttttgttgttgttaagcttatggtagtgtctttattttcttcatttctttttggatctgtgaaaattatattgctgactagtgttcaagaagtacacatacagagaattttctggaaatggggcccaagaatctctgtctctctctttctctttctgtgtgtgtgcatgtatttttatgaaaagctgaccaggttaacctgatgatcagccaggcttgggaatgggattgtgagtgttgctggcatcagctccttggttaccctgtggggacagtggaagaaaagctcttgtttggtcctgtctatttttatgccggagatcctgtttggagggagggactgggaaagcctctgtctcttgcttaactctaacttctgtgagaaccatccagctcctgtgctggcctttggttactatccacctagcagccaagcaggccctggcagggtggccactactgtggcgtttaatttgagcatgaggctgaacctgccaagtagaggttggactgtgactgcagaacggcgccttctctcacagtagaagtcagtttgtcgttatggggaggagtgctctgaaaatatttctagacttctccaaaatttttaactaagttactgaatcagaatcagacaactatctattttttactgtaacttttttgtgtctgtgtggcatatacaaacatagtagacatcaaaaccaaaattttatagagcggtgtcttatgacatctttaatagcagcctctccctccctgctttttaaaagtgaaatcttaatgggaagtgcagttaaaaagaagaaaatggacattttgattgcttctaggggttttttttttttttttttttttgagacagagtctcgctctgttccctgggttagagtgcagtggtgcgatctcggctcactgcaacctctgccacccaggttcaggcaattctcccgcctctacctcccaagtagctgggactacaggcatgcaccaccatgcctggttagtttttgtatttttagtagagatggggttttgccatgttggccatgctgatctcaaactcctgacctcaggtgatccccctgccgtggcctcccaaagtgctgggattacaggtgtgagccaccaagactgactggcttctagattttttgtttttgctttcttttttcttttttccattataagtagtgctacattaaatttacttcatatatgtgcttttactgttatagattagattcctacatctgggattacagtcaacagttatgcattgtcaaaattataatagctatttcgagataagagtattatccaaatgtggtgtggaatcccagtcttaagattattttcattactgcttatattccacagcgttagcatgagatgtatgagattttatctgaattttaaagcatgcaattcgttgtggaaagttattactgtgcctttaaatattaagagctaaaacttgacattgaacacattaacatttgtttatttgggggaatggcttttcctttgtagatcgctactcaaaaaagtaggttgtctgaaagtcaagaaaaagctgcgaacctgaagaaagacttggcagagatgcaggaatggatgacccaggccgaggaagaatatttggagcgggattttgagtacaagtcaccagaagagcttgagagtgctgtggaagagatgaaggtgaggcggggacgaccagtgccaacaggcttcatgcctccctcctccctttaaaaccagcacatcaatcatctgtctatctgtcaaacactatgtgcatgtagcatctttcacagtaggtttttgaattaaaaaaacataacagggtagctgctctaattttagcaggggaagaaagccaggagtccacatatttggcttggcccatgagttgagtccatgagggcccatgagacaagctcttaagttagacctttgggaggctacagagaatgacttaaaaacctctggtagtgggcatgaggaagaatgatcatttttttttaattggggtaaatacatataacattggtcagcttaatttttaagtgcacaatccagtggcattaattgcattcatcactatttccaaacattttcacaaagagttattttttgtaaggggaacaaaagagacctcccaagttgtctgaggtttattcttattttcctgttactaatcttccagttaatacatacggcacatatgaacactgacgtttcattagagcaggtaggaatagcggtaggaatgcatcggggagttcatattagttggatccactggatacatttcctgtaaacttgtactcctctgtcgatagtcttgaacactctctttttatatataataaaagaactgggcatcattcccaaatttctaacacagcttcaactgtccttgaatgttcaagccaaaggagatggtgttttcaaagcttttttttcctgtaagcttaagcaacacagtgactaatgttttacctcaaagttaacttacctagaagtgtaactaaagcaaaaatctgtgatttttttcaaaaaagggattatatgacattcatacattattatacatgaatcaaagtaaatatgacaggagacttgttggaagttgttttttcactaaaacatcttttttagtgtagctctttttgaaagatttaaaaatactcagtacataaggtattttaaaataggctaccatgttaagaattgtctcatttattgtctttctttacactattggcattgtagttctgtggattttaaaagttgctatagatgagatttgagaaaaatgatatttaaatatttgattgggcaacattttatttatttttattctttcaaacagccattaggacttacaaaaccactacacttaattactttcccccaatctaaggaagttcaaaaccattaagtagtagagaaaagtaaaggggaaagtgaaagactgttttatttgtatttattgccattaaaagtaatggcataaactgcaattacttttgcaccaacctgataggttgattttcctgaatgtcagattgtttatcttagcactgagaaacagctatttctggatcagatcatctcagtctaactttatcattgaaatgctattaattagcagaaggatacatgtgcctatgttctataattttttaaaaagcttaaattatttagagaacttttaaagatacttctaccatagtgtacctcaatttttgtgaaaatatatttatcacagtgtaatctgctcagccctccagtgataatgaaaattcactcacttaaattctgatcttggacccagactttgaaaatacttcatgtcagtaaacatactttggataacttacgttaacactgctgttatgaaatgaaaacatttgtgggagctgagtacattggatgcatgagtgaaatttcagagttagcattcttatttcaaaaacgctcaactgggctgggtgcagtggctcacgcctctaatcccagcactttgggaggccaaggtgggtggatcacctcaggtcaggagtttgagaccagccccgccaacatggcgaagcctcatctcgactaaaaaatatgaaaattaggtaggcatagtggtgggtgcctgtaatcacagcttctcgggaggctgaggcaggagaatttcttgaactgggaggcagaggttgtagtgaacaagactctatctcaaaaacaaaaacaaaaacaaaaccccacaaagaaccattcactgttacctaaataatgttctattttggcagttagaatcatccagatgttttaactttggtttaattcttgaaaaaaaaagaaagaaaagaaattggttactgagaaagggagacgtttttcaagttcatccatcctttcttggaacagagggcaaaagaggatgtgttgcagaaggaggtgagagtgaagattctcaaggacaacatcaagttattagctgccaaggtgccctctggtggccaggagttgacgtctgagctgaatgttgtgctggagaattaccaacttctttgtaatagaattcgaggaaagtgccacacgctagaggtatgctattattattattgttgttattattattattattattattattattattttcagtgatgtatttctgagatccaaactctgtaatgttttggccattttcaaatcttggagaaaacttctcttttctttcaaattctggattataaagaaaaaatagttcttgggaaatagtttgataaaaatgaaagaggggttaaaaacaggagaccaaaatctgtccctaattatcagaaggttcttgggcaagtcattttgtatattcaaactttactttttttataggtgcaatccaggttttcatgtaacagatgatctgtagggcctattccagtccaaaaattgcagagcacatttcaagcctctcttttgttttgttttgcctggttgagtacatagagaggaattattttcttttgagtggtgtctaaagttcaagagtcacctgaaggaaaaatagaacttaaatatgtgacagttttactgggtcttagataaaataccttttttttttctccctggccattacacgtaaaatgtagatgagtctatgaaatttttttaaactaagagtgaggttttgcttgtttgtttttatagtagtatgacttttgttattgcttgttggaagatttaagaaggctttcaatttacaacaatttaatttacattcaatttgacgtaaaacaaatatttgtattgtggcaaatcttgaaatggtaaaaaatggcaactgcaatatttaacctaaattcattcattactttgatcattcattcatttgtaaattcattcgtttcttgttctaaaccaattttgtgctaagataaatatatatcattgaggcaagttagtaagaaagctacttgatttgggatctgtctgcttcttggaagtggtcttctttgagtcattttttctttcccataagaaaagaggttgtgcttgcatctgagcagatttttggtctgctttttgcttgtggaaattgggggactagaacctcttttcttttattctaattcagtggctggaaaattatggctgaggattttgttttgttttgtttgagacagggtcttgctctgtcacctatgctggagtgcagtggtatgatcacagctcactgtaacctcaaactcctgggctcaagtgaccttcctgcccccgcttcctgagtagctatgactccagccttgcaatgccacacctggctaattatttttaaattttttttgtagagatgggggtcttgctatgttgcccaagttggtctggaactcttgggctcaagccatcctcctgccttggcctaccaaagtcctgggattaaaggcattagccactgcacccggactggctgagggtttaaatctaacttgtagtttggttttggatacctggttaactgagaatagtttatacatttctcaagggttgtacaacacatacccccctccaagaagaatctgtgataggaagcaaatgtgtcctcccaaaacctaaaatatttactggctggccctttgtagaaaaatgtactgctccttgatctggtaagcatacttcatatggagagtggaccggcaggtgccttcactcatttatgtaaaccagaagatgcctccactcattcagtacattcaagacgacaagcccaggaggcatccagctgagttctttctcctaaacttaccactcaaataagttcctcttataataagggattataaatttataaatgtttccacccactacacaacccctgggtccctgctctggaaacctcagaggggaatgagtgatcaaaaccaacacagtaagaacagtataactccagttttggtaaaatgtggctctcttatattgacatgtcctcatgaatttagaaaaaagttgggaaggctacattgcaaacttttacatcagttagctccaagttggaattgggtggggcccaggagatttcaattttctatgaaattattttttaaaaatttacaattgggagcaattttttcattttgttcaaaaaccaaactttttttttttttttttttttttttttgagatggagtttcactcttgttacccaggctggagggcagtggcgtggcctgggcttactgtaacctctgcctcccaggttcaagtgattctcctgcctcagcctcccgagtagctgggattacaggtgcctgccaccatgcccagctagtttttgtatttttagtagagatggggtttcaccatgttggccaggctggtcttgaactcctgacctcatgtgatccacctgccttggcctcccaaaatgctgagattacaggtgtgaaccaccgcacttggtctttaaaaaacaaactaaataatgtttctctcctgtttttcttactaattatatagttctatttttgacatttaaatcagatcatggaatttattttaaagagtgaggcagcctcttgcccactctttgctccccacccttcaccaactggtctcatatgattttgttgattattttattttattttatttgagatggagtcttgctctgttgcccaggctggaatgcagtggtgcaatctcagctcaccgcaacctccgcctcccgggttcacgccattctcctgcctcctccagagtagctgggactacaggcatccgccaccacacccggctaatatttttatatatatatatatatttttagtagagacagggtttcaccgtgttagccaggatggtcttaatctcctgacctcatgatctgcctgcttcagcctcccaaagtgctgggattacaggcgtgagccaccacgcctggccgattttattttatttttttgaagtttcaactccatcagttctgaattcctaggtatactcacatccaaatgaaattattagcgattaaagagaatgtgtagtactagagatacgatgtgtgaaatggctttttgtctaatttaaaatttttcatgctttaggaggtctggtcttgttggattgaactgcttcactatttggatcttgaaactacctggttaaacactttggaagagcggatgaagagcacagaggtcctgcctgagaagacggatgctgtcaacgaagccctggaggttggaacccgtgatctccacggcatttctctttgctgtgatgaggccacacgtgtattacaatgaggaatgtaatgctttacgcaggcaaatgcatttgcttcctcagtggttttcaatgtcacttgcattttcttccatagcctgaagtgtttatacaatcatgtgtatttagattattggtgacccattatatcagcctcaagacgtggttagctgtttgacatcttacattttagacatgttgaagcactctagtggttttccagtttattttagtaggccctggacaaagctctgccatatgttattaggacaactgctctcttgtttcatcaacaagttatttttactcactaaacacagcactgacagtttataggggattcctgtctcttaccttcagatgctagaagttaagacagtggttgagccatgggatcttgtcgtaggagcttgtcttcaagcctggatttgaactccttgaggccaagaaatgtacccgatgctttgttattcctcagttcccagcacagtgtgtagcacatgttaacttaataaccgtttcttaaatgaaatacagtgcaaagagggtaggtttgcttaacaaaaaagaaaagggaagggggtagataggcttttaaaaatgtcatggtaccatgtgggaactgagtggacaactggattaaaggtcagaaatgagtaaaatgtggcacttacattccaggagacggatgctctgctagagaaaagatgtcacttctcaaatatagcagagtgagagacagagtgaatgaaaaatatgaaaagcttaatttttttcctaatgtaagagtgaatacgtatatattcttgaaatatggaaaataaagaaaagtataaagcaaactctaagataaacattttaaaacagtttgtagatttcttcctaattattatcttttatgtatgcatactagaaggtagtatattggatcaaaggctttggagtcttttatttacttatttatctttttatttgagatggaatcttgctatgttgcccaggctggagtgcaattgcatgattttggctcactgcaacctccacctcctgagttcaagcaattctcatgcctcagcctcctgagtagctgggatcacaggcgtgtgccactaccccagctaattttgtatttttagtagagatggggttttaccatgtcggccaggctgggctcgaactcctgacatcaggtgatccacccgcttcggcctcccaatgtgctaggattagaggtgtgagccatcgcacttggccaggctttggagtcttaaagctttagagccatgttggaatcttagctcttcttttgactgtgtgtatgtaggcaagtaatttaacctttctgagcttcaattttccaatctgtaaactgggaatgctatttagcccatatggttaattagatttatgtatataaaaagtgtgtatataaaacaatgcctcttattctgcatatattgtaggaaaatgactacttatttttagtaatataattaataaaagttgagatcattttgcttgtatagtactgttctctgcctttgaactttgtgtcatgagcatttccccatataattaataattatttttaactttttattattcatttatttattgtttagagacatagtctcgctctgttgcccaggctggagtccagtggtatgacagctcactgcagccttgaactcttgggctcaagtgatcctcctgcctcaccctcccataattaataatagttgaaattatttttgtgaaattatatcatatatcacttgtgctaatttctcaattttatgcattttttaatcccatgatggatatttttgtgaattagtaatttacttaacttttggtcctgttacttaggtagatttttagaaaatataattacttgtttaacaaatagacattttggggatccttgataccttttgccttagtaaatgcattattatttttttttcccatctccattccagtctctggaatctgttctgcgccacccggcagataatcgcacccagattcgagagcttggccagactctgattgatggggggatcctggatgatataatcagtgagaaactggaggctttcaacagccgatatgaagatctaagtcacctggtaagagttgggacatacatgggtgttgattaggtattgatgaagtggagctggccctaagctccatatcatagagctttaatgttggaaaaatctttaatgttggttaaagttggtaaccaatgctaacaggggcattgagggtattgaaatattcagaaaggaagaatagatctaacactctaagacagaactggatgattaaaaaaattatttttgagattacttctacttacaaacatttaattttcattaaggatcatatgatagctgtatataagaacaacaactcatactatcctagtaaatattagggccatgatatttcacataagctgctgtgaaagccatagtctcttagttcatatccaggttgtaacatacatattcgtatcacaaattagagaaagaacatttcttttataggaaggttgggtatgaatattaggtgcttccaaacacatattaaataataactgttgatgttcagcccatgaataacatcaagcttaacccaaaagtgctgtaaatagtagtttgatatgtatgtacacctatagaatttgttttaggctttggaaaaaaagagactctgatgtttgtgtattgatagacatttttcttatgttttatattcttaattggcagacattgctgattcctaaaaatgctttaaaattataataaataacacatttttatcttctgtttaatgcatcttatgggaaacctttacatttttgtatttcaacattatatatagaaagaagtaataattagtaattcagctgcatggtacataagatcctagtgggacattttcactgttatcattagtaattattatttatttataaagaaagctaaagtcttggatgaaagcttttatggtcttttcttagtggccagaatatatatattctgctatttatatttgtgttgggcaactaatgattcaatttctcctttgtgcaggcagagagcaagcagatttctttggaaaagcaactccaggtgctgcgggaaactgaccagatgcttcaagtcttgcaagagagcttgggggagctggacaaacagctcaccacatacctgactgacaggatagatgctttccaagttccacaggaagctcaggtattgccgtgcatttgagggcttttgagctgtaaagagagcttttgtaattgcctcctcaactataagagaacccctcctgctctccaaaaccgagagtcaatgggaaagattgaccttacttacagggcagcatttgggttttggagttctcttgctttctatgtgagactctggcaaaagtcttatatagtttattttattttattttattttattttatttatttatttgagacagaatcccactatgtcacccaggctggagtgcagtggcacgatcttggctcactgcaacctccgcctcctgggttcaagtgactctcctgcctcagcctcccgaataactgggactacaagcacgcgccaccacgcccggctaattttttgtagttttagtagagacggggtttcgccatgttggccaggctggtcttgaactcctgacttcaagtgatctgcctgcctcggcctcccaataatttttgtatttttagtagagacggggttttgccatattgtccaggctagtctcaaactcctgacttcaggtgatccaccttcctcggcctcccaaaatgctgggattacaggcgtgagccactgtgcctggctgaaaagtcctgtatattttaaattgtagttttcttagctgtgaagttgggacaattccttccttataaataagttgtgaacattagaaacgacaaatgcaaagcccttagcaggtgcgtcatgtacaatagtcataccatgcagtgggccatattattattattatacaaaaacgtattattattattttttagacggattctcactctgttgcccaggctagagtgcagtggcgcgatctcggctcactgcaaactctgccccacaggttcaagcaattctcctgcctcagcctcccgagtagctgggattataggcgcccgccaccgtgcccagctaatttttgtatttttagtagagatggggtttcaccatcttggccaggctggtcttgaactcctgatgtcgtgatccacccgcctcggcctcccaaagtgttgggattacaggcataagccaccgcacctggcctacaaaaacttattaaagcttctgtggaggtcaacattatgtaaaatacgatatcatgtattacacaacgatatagaacttttgtattgtctctttttatacttaagtaaaaaaaaaaggacatcctctcccctttccaatctctttttagaaaatccaagcagagatctcagcccatgagctaaccctagaggagttgagaagaaatatgcgttctcagcccctgacctccccagagagtaggactgccagaggaggaagtcagatggatgtgctacaggtaaagaaggccaggagcttccttttacttttcaacttgttgggaattttcttcaaaaaagagaaagaattgattacttgggcaccgtttgtattctttgtgatgtaaaccatgggatgggagtgatgatgtgttgaaggttgcatcctagggcagcagaaacaaattgttgcatgtgtggaaaaatatgaaatctgattttgatagctgagatgagaaacaagagagtgagccagatttagaagttagctttatatacactttttctttaatgcagagcctctgtcagtatcgtgtggctgatgctgtgggcaggccgagcatgaattggatgcagcatcatttagttctttcatggttgatatgacattgactttcactctgaacttgtgatgaagggcattttgagttctaggttcctgaactatctttttgaacatgaagttttaattccagtgaggtcagctttatctaaatttcttatccaaatctattacttctgagattgagacactgagtgttgtaatttttgacactgggctatgcagttcacttaggtgatcgggtaccctcactgagattcattaggagttttttattttgggtcatatttctgaatttttttcttttggtactttatggtacaaatttttagtagtatctgttatgctcatgatgagagagataatcatcctgatgggaattgcatattttcatttctgcaaacagaggaaactccgagaggtgtccacaaagttccagcttttccagaagccagctaacttcgagcagcgcatgctggactgcaagcgtgtgctggatggcgtgaaagcagaacttcacgttctggatgtgaaggacgtagaccctgacgtcatacagacgcacctggacaagtgtatggtgaggcttttgggtgattggcacatccagtggctttttcagcagctgttatggcttggtctagcaagtacatgcctagtgtgtccagtgatcactagtctacagtgtgctaaacataaggattgatgatggaaaacgtgttaaaaaataagaagtgtggtctttccctccaaagaaattagaagagataagagagatagctaaggaaactagaatagacatgtatataacatgatgacaaaaaccaaaacaaaagaaatacagcttaatcaccatgtgaagttaggagggcttcagcagagtgtgactaataagcaaagttttcaaggataaatttgaattagctagaagaaccatacttagaatggatatcgtaaaaattccattttctaggaaaataaaaatttcaatagaaatttaaaccttaagataggaaagaagaaatgatatataaggccttattacttttttagtcttgaactttataattcaattgaatagaaatttaaaaataatgtggctaaggggacacaatcttagaattagtgttctgcttgagaatcacagaacttaagatgagactctttaggacaggagaggtatagggacagttctttgtgcttttcaaaacaaaggataaattttaatatatatgtgcatgtatgtaagtatttatttgattattgtgacataatggtaatcagagaaagtgctgtccttgacttcatggaacatacatagttcaggggtctgttacatgacagcgtcctatgagatgttgagatgatgatgtataggtgtcaagagaagctgtttagaataaagctttttggtttcaggtaactaggaagaagacagctctgaatttgacctacagaactacgatttctttttttatatttaaatttatttttatttttaatttttgaagacttttaggttcaggaagtacatgtgcacgtttgatacatggatatattgtatgatgctgaggtttgggcttcgactgaacccatcacccaaataataaatgtagtacccaattggtagtttttcagctcttgcccctttcctccttccctccttttggagtcccattgtctttgctttccatctttatgtgcatgtgtgcccattgtttaactcccacttataagtgagaacatttagtatttggttttctgttcctgaattaatttacttaggataatggccttgagctgcattcatgctgctgcaaaggacatgatttcattttttatggctgtgtagtgttccgtggtgtatttgtaccacgttttctttatccattcccccattgatgggcacctagattgatgacatgtctttgctattgtgtgtagtggtgtgataaacacgggagtgcatgtgtccttttggtagaacgattatcctcctttacttatatacccagtaataggatttctgggttgaataataattctatgtttagttctttgagatatttccaaactgctttccctaggggctgaactgatttacaatcctaccaacagtgtatggtgttcccttttctctgcagccttgccagcatctgttgttttttgactttttaataatggtcattcagactggtgtgagatagtatcttattgtggttttgatttgcatcagaaatctgtttacttatagttatatacatcttgatatatcgagttttgtattttttatcatacaaattatatatgttcattgtggtagacttagtacttctgagaaatagaaataaatgttaataattccaaatccaacagacagcagtagccagtgttggcttgttttagtcataacatgcaagattttttaaaaatgtaattttaattgtgataaacattctgtttttagtcctaatgttttcccattttatgtaggaaaaatatttatattatcaagtactttcataagcatttgtctgagattttgaaagaatgagcataaactctattagtttattttcttgtcagatttgaagaagttattacaagcttgatttcatttgactcgaccttcagaccaaatctgagaaagatgatggcctttgatcaccatagttaggtcttggctgtcaatctgtgtaagctgtggtctgacatgatgccagttggcaagttgtcaccacagtgtgtaatttgtctttttctttgtttgttttaaagaaactgtataaaactttgagtgaagtcaaacttgaagtggaaactgtgattaaaacaggaagacatattgtccagaaacagcaaacggacaacccaaaagggatggatgagcagctgacttccctgaaggttctttacaatgacctgggcgcacaggtgaggagagcagccccacagctcatctctctgtctctctctctctctctctcaatctctctctctctctcgttctctctcatgtatttttaaatttcattttttggaaaatgcatgtttgaaaattatgagattcatacgtgttttcaatttattgtaataattgttatatttctttaaatgtatgtggtaatattacagtgattcatagttacatagaaatttatttttggctaggcacagtggctcacgcctgtaatcccaggtctttgggaggctgagtcaggtaatggcttgagcccaggggtttgagaccagcctgggcaacatgatgaaaccttgtctctacaaaaaaatacaaatgaaaacctccaaaaacaaaacaaatttccaaaaaaaaattagccatggtggtgagtatctgtagtcctagctacctgggaggctgaggtgggagagctgcttgaacctgagaggcagaggttgcagtgagctgagatcacaccactacactccagcctaggaacagagtgagacactgtttttaaaaaaaatttatttttaatatttaattcaggctaatatttatactttcaatggctactgatattccataaattattctaaggatactacaagtaatatatgttcattgtggtagacttagtgtgtctggaattggtgggttcttggtctcactgacttcaagaatgaagctgtggaccctcgtggtgagtgttacagctcttaaggtggcgcatctggagtttgttccttctgatgttcggatgtgcttggagtttcttccttctggtgggttcatggtcttcctggctcaggagtgacgctgcagacctttgcagtgagtgttacagctcttaaggcagcgcatctggagttgttcgttcctcccagtgggcttgtggtctcgctggcttcaggagtgaagctgcagacctttgcagtgagtgttacagctcataaaagcagtgtggacccaaagagtgagcagtagcaagatttattgcaaagagcaaaagaacaaagcttccacagtgtggaaggggacccgagcgggttgccactgctggctcgcgcagcctgcttttattctcttatctggccctacccacatcctgctgattggtagagacgagtggtctgttttgacagggcgctgattggtgcgtttacaatccctgagctagacacaaaggttctccatgtccccaccagattagctagatacagagtgtggacacaaaggttctccaaggccccaccagagtagctagatacagagtgttgattggtgcattcacaaaccctgagctagacacagggtgctgattggtgtgtttacaaaccttgagctagatacagagtgccaattggtgtatttacaatcccttagctagacataaaggttctctaaggccccaccagagtagctagatacagagtgtggattggtgcactcacaaaccctgagctagacacagggtgctgattggtgtgtttacaaaccttgagctagatacagagtgccgattggtgtatttacaatccctgagctagacataaagactctccacgtccccaccagacccaggagtccagctggcttcacccagtggatcccgcacccgggctgcaggtggagctgccttccagtcccgcaccgtgggcttgcactcctcagcccttgggtggtcaatgggagtgggcgccgtggagcagggggtggcactcatcagggaggctccggccgcacaggagcccatggagggggtgggaggctcaggaatggcgggctgcaggtcccgagccctgccccgcaggaaggcagctaaggcccggtgagaaattgagcgcagcgccggtgggctggcactgctgggggacccagtacaccctccacagccgctggcccggtgctaagtccctcattgcctggggccggcagggccagcctgctgctccgagtgcggggcccgccaagcccacccggaactccagctggcccacaagcgtggcgcgcagccccggttcccgctcgcgcctctccctccacacctccctgcaagctgagggagtgggctctggccttggccagcccagaaaggggttcccacagtgcagcggtgggctgaagagctcctcaagtgctgccaaagtgggagcccaggcagaggaggcgccgagagcgagcgagggctgtgaggactgccagcatgctgtcacctctcattagtacttcaaagaaatacaagggaaaaaataaatgttaataattccaaatttcaatggatagcagtagccggtgttggcttttttctagtcgcaacatgtaagatttttctaagtgtaattttaattgtgagaaacattctgtttttagtcctaatgttttcccatttcatgtaggaaaaatgggaaataataatccctgtaaaaactcaagttgttggtccttagatttctaaattgaacagtctaccgagaaatgttaaaacatcagggctctagtaaataaccagtggcaagaagttcacattaatctaccaggatttgaaatcctggcaagaaatatctctaatttgggcattttagtgaatccatgcaggagttgttgagcatttactgtgagtgaatgaatttttgccctgaaaccaggagagcaaagaatgtgtggaagtgtgaaaccttaataggtaatattgaaaacccatgtttgatagtattttggatcctccttcagttaggaaatattaactacttccagttgaggtaatattgaagtttctatataagcccagagaaaaatagctgaaattttgttttcagttgaaatcagaacgaccagtttatactttttctgggtgattttgatctcacttctgcaagcttagattgttgatgtgatacattttgatgtattacatgtctggaacacacaccttagagcttctttttggaattatacagctggttattcgttaaatattattatatttattcactgactgggcattttatgaatggaatggtattgctggtttttgcactaattctccaattgtgactataattttagtattaattaattttatcatttaaagtttcactcaatcgagattttactctgtgtcaggaattatacaaggagacagtgatgaggaaagatataaattatctcgttgtctaatggaacttagggtagtgaaagagaaaaacattgagtagttacatgagatgatgtcacattatcagtctgaagagttatgaagaatgtacatggttctttaagagtataggtaaaggggggtttcacccagtcttgtgttaggaaggcttccctgaggaggtgatgcataagccgagatctgaagtctgggtaggagtaacctgggtgaaacgaggagatttctagactgataaaacagtatatataaaagctctaaggcaggaggcagtgtggtacatttatgtggctagagcagagagagccagtgtgaggaacatggtgctagggagataggattagacaaaatcctgccaatgtcatagagtttgtgttacagattaaaatctgtgtcttaagcagttactgcacaggttttagtaggcaaattacatactcagatatgtcttttaaaggattactcactgcattttggaagaggaattggagggaggctggagtggatgtgaggagactggtttcgaagtcattgtacacttggtgagagatggtcgtaccttgaactaggatggagagtggagatggagtgagtgaattgatttcagacatatgtaggaagtgaaatcaacaggacttggtccaggaggagagatgaaggatgacccctgggtttctggcttgatgatgtggatggtgtggccattgagatgggtgctgtaagaaaagatagaggaccgggtgcggtcgcttatgcctgtaatctttgcacgttgggaggccaaggtggtggatcacctgaggtcaggagtttgagaccagcctggtcaacatggcaaaaacccgtctctactcaaaaaaaaaaaaaaaaaattagctgagtgtggtagtatgtgcctgtaatcccagctactcgggaggctgaggcaggagaatcacttgaacctgggaggctgaggttgcagtgagtcaagattgtgccactgcactccagcctgggcaacaagagtgaaaactctgtctcaaaaaaaaaaaaaggtagaagcatgcagaaatcacaggtatgtattggacatgttgacattttaagtacctttgagaatgttaattggaaatgtcgggtactcacatgattattcaggtctggagaatatatctggactgaagaggtggattttatgagtcatctgcatagaggtcataattaaagtaatcagggatgatagattgtctaggaacaggatatagtgaaagaagagggccctcaaccaagtcttaagaattacatcatttagtaagaaatctcaggaagatgagcttgcaaaagaaactaatgtaagtagcaagaagtggtagggacacagttgagtactaggtctggaaagctaggggaagatggtattttgacagagtgcagttacctgttttggatattttgaaagttaaatatgatgtccacataaacatattaattagatcagttgccattggggtcattattgaacttagcaagggcaatgtctgggagtgatggtggtagaagccagaatggcatggctcaatccaaagattgtaccaccctggccttggccttaacctctttaagtttcattttcattatccataaagtagaaagaggctttgtgaattttattgcatacgtgtgtaagattccttagcacaacacggaagctgtattaagagcttggtaaatgttagttaagttcatttgttttctgtcaacaacaatgagagcaaaataataataaggtttggtttgtatagtcgtgtactgcattttaagttaaagtggttaattataaaacatataattgtgaaaatggtgctattttcccctcaagttactataataccgtatttttccttcatggagaggattctaagatatcttatgttcaaaattataatagatactagtgatttttcaactttatttctgcccttttatgtgtgtttttctcgcttaatacacataacaatcttttttttttttgagacggggtcttgctctgttgcccaggctggagtgcagtggcaggatcacggctcactgcagccccagcctccagggctcaagcgattctcccacctcagcctactgaccagctggaactacgagcacgcaccaccatactggctaattttttgtattttttacaaaatgaggtctttcattttgtagaaaatgaggtcatgtttcccaggctggtcttaaactcttggactcaaaagatttgcctgcctcggcctcccaaagtgctgggattatagacatgagccactgtgcccagcctcataccaatcttttgagggctatacctctgccagtatcacttaggaaattaatgatagagctaagatgaaaacccaggattgcctggcacttaaccactacagcatattgcctccttgcagaaatgcaagcttagaggattctaaggtgctaagacaaaggttatgtatgtcttgggggttatatatgaatcagtttggatctttagttaacattctgattcattctcatttatgttcattcccatctcagtctcagtctctccctgcctctctccgtctcaggtgacagaaggaaaacaggatctggaaagagcatcacagttggcccggaaaatgaagaaagaggctgcttctctctctgaatggctttctgctactgaaactgaattggtacagaagtccacttcagaaggtctgcttggtgacttggatacagaaatttcctgggctaaagtaagttgcagttcagatgaaacaccagcatgatgccagcgtaacatggcatttgttcgggcgacctggttggataccatgtccctccattttatattaaatctagccttttcttttttgcattgtttttccacttctctgtcctaagaaaaaatattttaaaaataatgattatattttattttctttataatttctacttttagattaaggggtacacatataggtttgttacatggatatattgtgtaatgctgaggtttggggtatgaatgatcccatcacccaggtagtgagcatagtacccactaggtagtttttcagctcatgcctccctctgtttctcgcccctctactagtccccagtgtttatcgttcccttctttatggccttgcgtacccaatgtttagcccccacttgtaagcgagaacgtggtaattggtttcccattcctgcattaattcacttaggataatggcctccagctgcaaccatgttgctgcaaaggacatgatttcattcttttttatggttgtatggtactccatggtgtatatgtatcacattttctttatccaatccaccattgatgggcacctaggttgatgacatgtccttgctcttgtgaatagtgctgatgaacatatgagtgcatgtgtctttttggtagaacagtttattttcctttgcctatatacccagtaatcagatttctgggtcagtaatcagaattctgtttgaagttctttgagaaatttctaaactgctttccacagaggctgaactaatttacattcccaccaacagtataaaagtgttcctttttctctgcaaccttgtcaacatctgttattttttgactttttaataatagctattctaaatggtgtgagatggtatctcattgtggtttcaatttgcatttctctaatgttagtgatgttgagcattttttcgtgtgttgttggctgctagtatgtcctttttgaagtgtctgttcattttatttgcccactttttaatggggttatttgtaaaacagctcttttaataagatatttttatcctgattccaaaagcattacattcatggatcatcaaggcctttataggtattatttttatatagtacttaaaagcctaattcaccacctttaaaatcaatgacacatatttacagagtgtttacaaagaattgtgctgagtttaattcttctttaataacattttaaaaccaataagtaatctttctattgcaaactttcagatgtaaagaacttaggaatagaattttaaaaaatcaatacaagagttttctttaaccctgtactttgaaatcacagagattagaaagttgatttgctggttctggcttctgcagtagagaaagaattgaatggaacatgagtggttcttttaacaaggcattctgttttcctaaatctctttcctgagaaagaagcgagtatactagtgggaagtgctgaatataaatgatcaatactgtgactgatgtttatataaagccacaagtatcagtttgacaccctctacagctctacacgtttgctgtgggccttgaggagaaggtgctgagaggttgtggggtgacacaactcctgcttactttgaatgctctgtggagatgacagctgggagaaagttaagatagtagacactggaaagactattctcagtttagaaaaaagctcatgaaaagcgtgatcatgccatgagcagtgtgagtgtaaaggaagtgaagaaaggaatgtatgagggaaatgagcattgcaagtcatcggtgtgttgtggttgaatgcaaaacaaaggcaccaaactttattgttgttaaatttaagtttttcaaggacatattatcatcctcgtgcagtatactttgaaaatcattactttttaaattagtaacataagtaatagaagctatttgaatgaaatttgcctagtgtaatacaaaaaaacaggagcaaaaatcacctataatcaaacaatgctattttttttcatttttttgagcacatttcgatgtgcacatgcaaaagcatatatttaaaaataaattttgttgtaactagtatttattgaccttcttttaaaaacttacatctttggcatttttctttacctatacttgtttttatatagcatattagagatatgcatagtatttcattcttaatttttttattttctcatttctctattcatgtccatttaaattattaccattttcattattatagataacgctatggtgaatatattaaaccatatcatacattcataattatttcctgaggataaattcttaaccctaaaagtattgatcaagggacaggaatatatccatttttaagtcttatacatattatgcaattgttcttcagaaatagtgcacctaccacatgcgaatgagaatttctacttgacatcatgttttggttatttaattagaacatttttgacaagtttataggtcttctatagcgctgttaaaaataccgctttttactctaattctgaccattttttatcaccaaattggtcttttaatttggagctttttatctgttctgattatcaatgcttagtgagttgtgtttgattgcaaacaaatttttttattactgtagcttccttttttgtttttttaagttttattttttttttgaaaaaaagtaaatccttctgaatattttttaatgaacaaaatccatctttttcttcattatttctgcctttagtgcttagaaagaccacctcaactccaggttcatttaattattcactttttttttctactagcttttttccttttttttaattgttatactttaagttatgggatacatgtgcggaacgtgcaggtttgttacataggtatacacgtgccatggtcatttgtctcactcatcaacccgtcatctacattaggtatttctcctaatgctacccctcccctagccccccagcccccaacaggacccagtgtgtgatgttaccctccctgtgtccatgtgttctcattgttcaattcccacttatgagtgagaatatgtggtgtttggttttctgttcctgtgttagtttactgagaatgatggtttccaacttcatccgggtccctgcaaaggacatgaactcacatttttaatagctacatagtattccatggtatatatgtgccacattttctttatccagtctaacattgatgggcatttgggttgattccaagtctttgctattgtgaatagtgctgcaataaatatacgtgggcatgtctttagagtagaatgatttataatcctttgagtatatacccggtaatgggatttctgggtcaaatgatatttctggttctagatccttgaggaatcacctcttccataatggttgaaataatttacactcccaccaacagtgtaaaagcattcctatttctccacatccactccagcatctgttgtttcctgactttttaataatcgctattctacctggtgtgagatggtatctcattgtagttttgatttgcatttctgtaatgaccagtgatgatgagctttttttcatatgttttttggccacataaatgtcttcttttgagaagtgcctgttcatatccttcacctactttttgatggagttgtttgtttttttcttgtaaatttgttgaatttccttgtagattcaggatattagccctttgtcagatggatagattgcaaaaactttctcccagtctctaggttgcctgttcactatgctggtactttcttttgctctgcagaagctctttagtttatagatcttatttgtcaattttggcttttgttgccgttgcttttggtgttttaatcatgaagtctttgcccatgccagtgtcctgaatggtattgcctaggttttcttctagggtttttatggttttaggtcttacgtttaagtctttaatccatcttgagttaatttttgtataaggtgtaaggaaggggtccactttcagttttctgcatatggctagcctgttttcccaacaccatttattaaatagggaatcctttccctattgcttgtttttgtcaggtttgtcaaagatcagttagttatagatgtgtggtgttatttctgaggcctctgttctgttccattggtctatatatctgttttggtaccagtaccatgctgttttggttactgtagcctgatagtgtagtttgaagtcagctggatgcctccagctttgttctttttgcttaggattttcttggctatatgggctctttttgtttccatatgaaatttacagtgtttttttctaattctgtgaagaaagtcaatggtagcttgatgggaatagcattgaatctaaaaattactttgagcagtatggccattttcacagtattgattcttcctatccacgagcatggaatgtttttccatttgtttgtatcctctcttatttcattgagcagtggtttgtagttctccttgaagagctccttcacatcccttgtaagttgtattcctagctatttaattctctttgcagcaattgtgaatgggagttcactcatgatttggctctctattattggtgtataggaatgcttgtgattttttgcacattgattttgtatcctgagactttgctgaaattgcttatcagtttaaggagtttttgggctgagactgtggggttttctaaatatacaattatgtcatctgcaaacagagacaatttgacttcttctcttcctatttgaatacgctttatttctttctctttcctgattgccctggccagaacttccaatactatattgaataggagtggtgagagagggcatccttgtcttgtgccagttttcaaaaggaatgctttcagcttttgcccattcaatatgatattggctgtgggtttgtcataaatagcttttattattttgagatatgttcagttaatacctagtttattaagtgtttttagcatgaaggggtattgaattttatcaaaggccttttctgcatctattgagataatcgtggtttgtgtcattggttctgcttatgtgatggattacgtttattgatttgtgtatggattacatttattgatttgcattgaactagccttgcatcccagagatgaagccgacttgatcatggtggatacactttttgatatgctgctggattcagtttgccagcattttattgaggattatcacattgatgttcatcagggatattggcctgaaattttcttttttttgttttgtctctgccaggttttgttatcaggatgatgctggcctcataaaatgagttagggaggagtccctctctttctattgtttggaatagtttcagaaggaatggtaccagctcctcttagtatctctggtagaattcagctgtgaatccatctggtcctgggcttttgttggttggtaggctattaattattgcctcaatttcagaacttgttgttggtctattcagggattcaacttcttcctggtttagtcttatgagggtgtatgtgtcctggaatttacccatttcttctacattttctagttcatttttgtggaggtgcttatagtatcttctgatggtagtttgtatttctgtgggatcattggtgataccccctttatctttttcttgtgtgtgactatttgattcttctctcttttcttctttattagtctggctagtggcttatctattttattaatcttttcaaaaaaccagctcctggattcattgaattttttgaagggttttcgtgtctctatctcctttagttctgctctgctcttggttatttctgtcttctgctagcttttgaatttgtttgctcttgcttctctagttcttttaattagggtgttgattttagatctttcctgctttctcatgtgggcagttagtgctatgaatttccctctaaacactgctttagctgtgtcccagggattctgttatgttttgtctttgttcccattggtttcaaagaacttctttacttctgccttaatttcgttatttacccagaagtcattcaggagcaggttgtgcagcttccttgtagttgtgcggttttgagtgcgtttcttaatcctgagttctaatttgattgcactgtggtctgagagactgtttgttacgatttctgttcttttgcatttgctgaggagtgttttacttccaattatgtggtcaattttagaataagtgctatgtggtgctgagaagaatgtatattctgttgatttggggtggagagttctgtatatgtctactaggtccacttggtccagagctgagttcaagtcctgaatatccttgttaattttctgcctcactgatctgtctaatattgccagttgggcgttaaagtatccccctattattgtgtggaagtctaagtctctttgtaggtctctaagaacttgctttatgaatctgggtcctcctgtattgggtgcatatatatttaggatagttagctcttcttgttgcattgatccctttaccattctgttatgcccttctttgtcttttttgatctttgttagtttaaagtctgttttatcagagactaggattgcaacccccgcattttttttttttttgctttccatttgtttggtaaatattcctctatccctttattttgagtctatgtgtgtctttgcacaagagatgggtcccctgaatacagcacacggatgggtcttggctgtttatccagtttgccagtctgtgtcttttaattggagcatttagcccatttacatttaaggttaatattgttatgtatgaatttgatcctgtcattatgatgttatctggttattttgcccattagttgatgcagtttcttcatagtgtccatggtctttatattttggtatgtttttgcagtggctggaactggtttttcatttccgtatttagtgcttcctttgggagttcttgtaaggcaggcctcatggtgacagaatatctcagcatttgcttgtctgtaaaggattttatttctccttcgcttatgaagcttagttcagctggatatgaaattctgggttgaaaattcttttctttaagaatgttgaatattagcccccattctcttctggcttgtaggttttctgcaaagagatctgcattagtctgatgggcttctctttgtgggtaacctgacctttctctctggctgcccttaacattttttccttcatttcaaccttggtgaatctgacgattatgtgtcttggggttgctcttcttgaggaggagtatctttgtggcattctctgtatttcctgaagttgaatgttggcctgtcttgctaggttcggggagttctcttgcataatatcttgaagtgtgttttccaactttgttccattcttcttgtcacttttgggtacaccaatcaaatgtaggtttggtcttttcacatagtctcttatttcttggaggctttgtttgttcattttcattattttttctctaatcttatcttcacactttattttattaagttgatcttcaatctctgatatgctttcttccgcttgatcgattcagctattgatacatgtgtatgcctcatgaagttttcgtgctgtgttttcagcttcatcaggtcatttatgttcttctctaaattggttagtctagttagcagtttctgtaacctttttttcaaggttcttagcttccttgcattgggttagaacttgctcctttagcttggaggagtttgttattacccactttctgaagcctacttctgtcaattcatcaaactcattctccatccggttttgttcccttgctagcaaggagttctgattctttggaggagaagagacatcctggtttttggaatttacagcatttttgcgctggtttttcctcatcttcgtggatttatctacctttgatctttgatgttggtgaccttcgaatggggtttttgcatggtccttctttttgttgatgttaatgttgttgctttttgtttgttagttttccttctaacaggcccctctgctgcaggtctgctggagtttgctggaggtccaccccagacctgtttgcctgggtatcatcaggggaagctgcagaatagcaaagattgctccctgctccttcctctggaagcttcgtttcagaggggcactcacaagataccagctggagctctcctatattaggtgtctgttgacccctgctgggaggtgtctcccagtcaggaggcacaggggtcagggacccacttgaggaggcaatctgtcccttagcagagttcgagctctgtgctgggagatccgctgctctcttcagagccagcaggcaggaacatttaagtctgctgaagctttgctcacagctgccctttcccccaggtgctctgtcccaggcagatgggagttttctctataagccccttgctggggctgccacccttctttcagagatcagacagtctggctacagttgcttttctgagctgtggtgggttctgcccagtttgaacttcctggaggctttgtttacactgtgaggggaaaactgcctactcaagcctcagtaatggtggatgcccctctcaccaccaagctccagcattccaggtcgacttcagactgctgtcctggcagcgagaatttccagccgttggatcttagcttgccgggctccatggggatgggatctgctgagctagaccacttggctccctggcttcagtcccctttccaggggagtgaatggttctgtcttgctggtgttccaggcaccactggggtgtgaaaaaaaacaaacaaacaactcctgcagctagcttggtgtctccccaatcggctgcccagtttagtgcttgaaacccagggccctggtgatgtaggcacctgagggaatctccgggtctgtaggttgtgaaggccttgagaaaagtgtagtatcttggctggatagcaccgtacctcacggcacagtccctcatggcttcccttggctaggggagggagttccccaacctcttgcgcttccctggtgaagcgacaccctccgtgggctgcacccactgtctaaccagttccagtgagatgaaccaagtacctctgttggaaatgcagaaatcacctgcattctgttttggtcttgctgggagctgcagactggagctgttcctgtttggccatcttgccagccacctcctctgctagctcttttatagtttcatctttttacctttaatgcattaatctttccagtatttattttggtgtatttcgtgaggtaaggctctaaccttctttccaaaaggataaccaattatcttagtgctattggttgagtaattaaccttgtccccatggatttgacatgctaagttcatatattcttattttcctgttgcctttcgttgttttctgctccactgatctggccccatgaaatgtaccagtttttagaatgtttagccatgttttatagtatattttaactgcagttaatgggttccctctctttatgcttcatttttggtatatatcttatatgaactttagaatttttattgttaaattcttaaattctattggaaattttgatttgaattgccttgaattcatacatttgtgtagtgcagaattgatatctttgttatattaattctattcggtaacatatatgtctcatttttgtcctaaattctttcacattcctacataatgttttgatttttttctttataaacattattcatatatgcacaggagtttattcctacatatctatttttattgctatgtaaaaatatacttttcggtttttttacagagtgcttattgttggtacataggtgatattgattttatatattcaatttttaaacatccatgttcatatactcataaattcaatttgtttttcagctgattctcatagcttttttaggtaaagactcaaagcaatgaaaaatttgtttcttttggaacaatatgctcttaagtttccatttaatcttatttcagaattgaaatgataaagatgatatatacaagtcacaaattcacagcacattctcttcattagagtaaatcaaatgaaacatcagtatatattaataaccaccatctttttatcactgtcttttcagatttaaggaacatgcagatttcaccacattttaatgtatttgcacttaaagattatgtaaaattattttcaatgcaaagcttaaataaataatattttcatttctgaatactgtttttattccataacttaaatataactattttcaatgtaatcttttttactgtaaaaaagtatgtgtactatttagatgtaattacttgtagttcattattttttatagttcttaaatgctattctagtcaatcagtacatgcccactgaagaaatgaaagattcttattaataattgctgagagcatagctattgggtatcctttattttctccccccttgctagagaataatattggaaagtagtatttcagttctgtcataaatatgccagtaattgacatggccaagtgagtgtttaaacctggactcatttgtgaatttgtaattggtatgctttccaaggtgtgatttaatgtagaaatataaacttgagctccttaaaatgattggtttaaatgttgatttaaaaaatggtcaataatagtagcagtagggtagatacatgcatattgctttttgattgaaagagctttgtagttttaattgtggaactcatgctctctctataattctgtgactatatactttgcctggtgaaacttacgaatgtgccgatcactttatcatcataccatccagagtattatctttgcacttatgacagttgtaagaccaaagcttagacttgctgctctcttgtgagttacttacatgaaatgtttttttgtaatgtttattcagtatattatatgtgaaatcacccagctgtaagatgttatccttgcaagtacctatagtacacatcgatagtttcctctggtaatctaggagataaattcattgtgaatttttttaagttgtgagttctaggatccttctgctttgccagcttgtagttactgaaaatgaaattgagcctttacatttagagtgatgatgaaggtaattggcattcatatgtaataaatggatttatatttaaataaatgaaataattgctttcccacagctgagtgtgttacactcactggtatttgttgaattacacattttgttttccatttggaacttaagaattctcactatgttaataagtttgggaattttgtaaactttgacattgtaaattatatagggagtcatggactactttgtatatgtggcagaaaagtttttaataatttaaggttgtatatacttttataatattctgaagcatcaagtaggtcttggtgtttttattttctagaatgttctgaaggatctggaaaagagaaaagctgatttaaataccatcacagagagtagtgctgccctgcaaaacttgattgagggcagtgagcctattttagaagagaggctctgcgtccttaacgctgggtggagccgagttcgtacctggactgaagattggtgcaataccttgatggtatgtctcaggaaaaagtaaatgatgaaatcttctcctctcttctagttattttttaaatgaatacaactttgattaaatttcaaatcctgtttactgtgtgtcacagtgatgttttgcttgtgaattaatttcattagactaggttttattttttctttggaaaggtaataactagaaagaatttacagtgtttctaaatattcatgatctgcatggaatgaggtactttcatattttagtaaatgcaccttatttgtttcattttaatgatttcatattgtatttgattttcgtactatcagaagctatttttatataaaatcttcatagtgtttgaataatggcatactggttaagagcacaggctctagcatctgacggcctatgtaaaaattttcattactagcttggtaacactggtaaagttacttaaacattctctaaacctcagttgtttaatttgtaaaatggacattattatatctatctcatacagttttgcaatgattgattatgagccttaaacatgtagtgctcttaaataactatatgcaaaacaaccaattttagattttgctatgattataattattaaatattgtatatgtgttagtctttggttatgccactgctctgtaaatttgcatctcatggaaatagttaccatttaatttttatatggttttatgttcctatgatactaattgtgaatatatggccaccccaccctcccctgctgaggaaggcattgtcatttataattttttttaattctgaaatacctgagataggacttttatcaaatttatagaattactaggtaatggatagagacataaaaaatacattatcatgtgtttgaatatttatttaaattcctcaggatgtgtagggcagtgaagagcatgggctttgctcttgatctctaacagatttatatccacagtccatgacttattatctgtttaactttagctaagttacttaatgttactaagcttaaatttccatatatacagaatgagaacaaaagtatatacctaacagagttgttaaatattgaatataatagtgaatatgagattcttggcacatagaatatgctcattaaatattttatatattaatttttaattactagctttatttcacattcttatggcccttatttctgtattcttcagtctacacctttcaaactctccattcaagcagtatctttctagtgctgttagaacatttgatttacctgcttaataggggtaaacaagtctggcactcatcagttcttcctacttagaatccagatcactgttgatattttctcatatcatttattagttcacattttctttttttaaaaatgtttattttaagttcaggggtacaagggcaagtttgttttatttttatattgtttatttgttcactttttttttttttctgaggctgggtgtcagtctgtcacccatgctggagtgcagtggtatgcaacctcgacctccccaggctcaggtgatccttccacctcagccttgagagtagctgggactacaggcatgcgccaccacacccggctaatttttttattttttgtagagagggggtttcaccatgttgtccaggctggtcttgaattcctgaggtcaagtgatcctcccatcagggcctcccaaagtactggattacaggcgtgagccaccacacccagcctacattttcttttttcaactatgtttcatattatagattaatgatttctttctttgtaaaaacttttactgtctaagcattttccagtttcttttatcccacaaaatataattgctaaaggttaatttcatcataagtctcgttaccctttttggtcacactctaacttcttgccttagattaactgtttttcccagtcataatctgcttaactcttgcttctgttttcaaatctgttctgtcaagcacatttcatgtcctgcttcagtacatcttgctgtggtctgtgccagatgtaatattaagggctggtgatactgaggtaaggatacaaaggcactgtcctttgagcagagcatacagaatctttttcaattcatattttcatcattttaaaaaattattccttaaatgagttttttaaaaatatgggccaggtgtggtggcgcacacctgtaatcccagcactttgggaggctgaggaaggtggatcacaaggtcaagagatcaagacttcctggccaacatggtgaaaccccgtctctactaaaaatacaaaaattagctgggtatggtggtgcaagcctgcagtcccagctactcgggagactgaggcaggagaatcacttgaacctgggaggtggaggttgcagtgagctgagattgtgccactctactccaggctggtgacagagcaagactccatctcaaaagaaaaaagaaaaaaagattgaagagggcaaatcagatcagttgtaatataagaataaggaataagagatgaacttgcattgaaattgaaaaagaaactttcaccttttattctacttcaactttttattgtgctgaggtctaaatcaaataaatttaaaaagtgttaagcaccatagatgtgcatttttaggaataagatgagttattcactgaagaagagctctgcaggaaggtgaaagctctcctttaaattcatggtacagtttgctctttgaaggtcttttaaatctcttttaagattatcatcttaaatatttcatatggttatgtaagcattttattaattcctttgtagaaccatcagaaccagctagaaatatttgatgggaacgtggctcacataagtacctggctttatcaagctgaagctctattggatgaaattgaaaagaaaccaacaagtaaacaggaagaaattgtgaaggtagcaaacacagacatcagtaacgcttttgggagtggcatgttttgttgtcatgttttctcttctggaatgctctaagttacttagctctcattcctcccaagcattagattcattaacatttattttgatgggagaaactgagacaataagagacaaaataagagacgaacttgaaattgaaagacttgtaagagatttcagcacaatcaaccggagtaagacctattcacataagatgccaatgagtcttgctgattgctgacttttgtattctccattgagtgctgcttacttctgtattctccagtgagtcttacttacttttgtattctccaatgagtctgtcttacttctgtactctccaatgagtcttacatacttttgtattctccagcgagtcttacttctgtattttccaatgagaattacttacctctgtgttctccaatgagtcctatgtgaacagctctcacctggttgattatgctgaaatctcttactggggatcccagatatttatttaaactacctttccttctgtataagcatcacactcatgtttgggtttgatttttcccatgagataattttgtgttttcttataattagcgtttagtatctgagctggatgatgccaacctccaggttgaaaatgtccgcgatcaagcccttattttgatgaatgcccgtggaagctcaagcagggagcttgtagaaccaaagttagctgagctgaataggaactttgaaaaggtgtctcaacatatcaaaagtgccaaagtgagtaattatgcttttagagtaaaccatttttcctatgggtatgtatctaaatgatagtcatacagtacatacatcaacaattttgttttattattttaattttattgttttctctctctgtcaccgaggctggagtgcagtggcatgagctcactgcaacctccgccttctgggtgcaagctattctcctgcctcagccacccaagtagctgggatttccggcaactgccaccacacccagctaatttttgtgttttttttaggagagatagggtttcaccatcttggccaggctggtcttgagctgctgacctcaagtgatctgcccgccttggcctcccaaagtgctggaattacaggtgtgagctgctgcacccggccaacaatttttaaattaaaatgtttttaatcactttttctttgaatggagcatttgtccgtatttatttgtgattgtgcatatgaaggagagaaaacaagcaattagtattgaagaaaataacctatttgagaaaaggtttcaaagactcagtcaaaggttagaattggttatgaaatgatgaaactaattcccaagctagggatgaatattaaaccctttattttatggtcacactctatatatgtcttcacattgcacacaccacagaacttgtttttttttttgttttatatgacgacaaatctaaaagttacagataatttcacagtttaatcctaatgtaggaaagtactacctgattttataaatttaataaagagctttagacatttaattaacagggtaataaataggacctttatgagagtgctagttttcccacacttagccaaccccagatggtatttatctgcatttagttttattaaaattgttttattgagttttatttaaacaaatataaaatttttctacgtagatgttatctgaaaagatgacattgagaaatatgcacttctttgacgtttgtgtatgaaaatccaaggggaattctactgaggaaacttaactgggagacattctgtgaggtgtccctgccctgggggctgggtggctgttcttcctttctgtggccatggtaaggatagtttctggatcatggccatagtttcctgctatgctcgcatgtggtctccaaatccacgccacaacactctgggcagccacaatgaattgcaatactacgtcacatccctggctagagtttggagaaaacgggtcattcagagaagtctgaattggtaaaatcattgccatataaatgaatgaaacaaaagttagctgagctgaatagaaaagtcagttaaaaaagtgttagtttctctcttgacaccccatctctctgattaatgatggaaagtcaaattaaaaatctattttcagagaattcttttccttctacagttgctaattgctcaggaaccattataccaatgtttggtcaccactgaaacatttgaaactggtgtgcctttctctgacttggaaaaattagaaaatgacatagaaaatatgttaaaatttgtggaaaaacacttggaatccagtgatgaagatgaaaaggttggttcaaggagatttcaaaaccatggtggtctcatttttcttctctattaatttcatttttacatcaagatgtttgcccatataatctgtcaaacatgatgaaacagattcaaatgtgattttttgatgtgtgtcaatgtaagagtcacatgattcatgtgcttaaaaagaaaatagactcagtttctgaactagacataatccttagtattatctaatgtttgctaaactctctttgagacattttatcttcaaatataaaatatatttaaaaaaaacataaattttttgatcgttcaggttaacatatcttgacgtatactatactaagtaggttagttttcctccttaggagttgataggaagtgaccttatgcatttttcttttgagtcattttttttttccttttaaaaatttagatggatgaggagagtgcccagattgaggaagttctacaaagaggagaagaaatgttacatcaacctatggaagataataaaaaagaaaagatccgtttgcaattattacttttgcatactagatacaacaaaattaaggtattatgattggagagtctctgttgcatttaaataccttacttaactcttgccattcagatgtgtgatgctgcatcacagatgctttaaaacacaccagttggaatatcatctcctcctttctagtgtgtgttactagatgtgttcatatttttggatggtgcagaactcaaaatggaaatgtaaaaccttattattggccatctcttttggatttctgattatgttatcaaacctaaaagagatctatctatttcagaagtggcttcctccaattccatattttatttgtgaaggtcttgtctatgtcaaaaaaaatttctagtttaaaaataactcagtttgtgaaagtgatgtaatatgatttatattctagtaaagattcactaccagctccctttttatttctttatatttttcttttttttttttaaagatggggtatctctatgttgcccaggctgatcttgaactcctaggctcaagtgatcctcctatgtcagtctcccaagttgctaggactacaggtgtgtgggccaccatatccagctccagctcttttttaaacggcaatctttctagctgcattttaagtgtgctgttgttccctggggtccgttctttggtagttccttctagaacgatttttatttgatgactttggaaattaagtagatcgattatggtactgtatttttactgtaccttttctatgtttagatatgtttagatacataaatacttccaactgtgtttcagaattgcctatagtattcagtacaataacgtgctgtaaagttttagcctaggagcaattgactataccacacagcctaagtgtgcaggaggctgtaccatctaggtttgtgtaagggcactctatgatgtttgtatgacaatgaaataacctagagacacatttctcagaacatgtccctgttattaagcaatgcatgactatactttaaaaactagccattctctcaaggctgaagcctcaacatccttcttaactatttcttgttcctcacatatcttctcacatcacactgagtaggcattaaaactgttgagactgcttgaagcaacatacaggtttgaacgtgaagttagatattgctctaccagctgcttgttttatgaccatcagaaagtgccttagcttattttacttcactatcctttccataatttagactaatgattttctcccatgatattatatcccatggacatattcttatgtctgttttttctcactctagcatgtcctttgtctcttcctcacagttattctccccaaagtcatggctgatcatgtcattccttcatcgaagaaactgtttaggaaaatattgcaaaatacagaaaaagctttaaatgcaaggtctgtcaatataacgacatacaaagtcttcagtctgacccctggctccttatgtctttgatgtgctgtcacttcccatgtagtacagctatgctggtttttctttacattttcctaaacacatcatgtgccttagcacatctgggaacttattaattttattccgattccctagagtgagttttgtctttttaggttagctgaaaaatgcgttatcttttaaaactcagctccatttttatttctaacttctgtcagattatattatagttctctgctttattgtgactttttaaagtatctttcttccctaatgcttctccaagttcaggcaatatctttttcatctttgggtccgaaatcagaaattattactggcacaaaatagaaataagttttaagcttttaatacataaataaatttgtttgttaaaagtactaatatatactatacaagctaatttcattctggctttactaacattggtaggcgaactatgttacaaacttcaaatctatagttttcaaacttatatgattcttaagtgtgaacatgagaattactgtgggggagctttaaaaaaactacagtgcccaaatctaattcctgaaacaggtaaatcagaatctctcaggacctaggtgtgggcatttacaaaaacaaaacacaaaacatttgtagatgattttaatgtacaattaggattgagaagcactagtttacaggactcattgtcttacctgaaatatatgttaagtgaccttttccaatttgtttactagagtattactgtttttaaattatgtatgagcactttataaagatattaaccacttgccataattgctataaaatattatcttattgatatttatcttctaattattttatctttaagatataaccatttaaaatttttgtttagccacaggtgactatgttttcccttagtgatttttcaggggtttctgttttgggatctaaaaagttttcatcctccagaaagttgatgaatattcaattctgtttagttccaggtttttcctatggtttggtaaaaacaaaacttagaaatttaataaaacactcacttaaaaatctctttaatctttgctatatgatgtgagctacgtcatgtaacactgtctcatttaagtactgacctctagtatatttgtgtttctgtgtccttggagaattctttaaaaataaaattgtccagaagtaaagtctcggtcagatctcgaggacatttttttagtcctagggcattttgattgatcactctcttgggggaaaaaaatctattttgggaatacagaaagcacatgtttaagtcttgaacggccttgctgcttctgcaagagtgggaaggctcagaaaaatcctggattgtcctatagtctgaaaagaaaaagaggcagtcttaatgaatgggaattttttaaacttggatctttatgatacctactaacctccctagtttattctaaagcttcaggtacacgtggtcttgcagaatgacaatccgttatgtaactgaagaagcagcacaggaattccagtcttgcagtagtagctgaggtataaaagtggctcccaacatttacctaatggagcagattaaaaaacaaatgtggcatgtattatctagtggtgctaaatgaggaaagtactacaaaggtaaatgtccctacaagcataataaagtagttggatgtctggagttttttggtcttttggaaaacagatgacctttcagcaaaatcttggttaatggatgggaagccaagaaggaaaacgggtcccactttcctcttttactttttcgacatgattactcaacctagaaatactttcattgggctattttcttttccttaaagttaagagggagaacaattgagcctagttttctgatcttccaaaataaaaacactggcttatttgaaatgaaaatccaaaagaattatttttgattttttcttttcttaaaaaatacttagcatctttttattcataactggtttctgggtagatatgttatttatttcagcattcttttatatttgcttaaaacacagaatttgtttccttagacatatgggtaaatatctagaaatgctttctgactaaaatttaaacttgcggcattaggataataaaattaatcttggagacaagtgtaattagttctgttgttaaagtcaagaaatgtatagacctgcttctaacctggctatccagaactaccctcaaatgatggacgcagtagtttaacaaattctaggaggcaataatgcagtcctctaggttcaacaccatgttatccactcaatgattttagtcatgagtcttggattcctttagagattggattgtaaccattttcaagatcactaactgaattaacatgcatttgtgatcgttttacctatcatcttgaatttacagatgattatcattttttagaagttcaacataggagaagtgaaagtgtcaaggaaggtaccttaattcatgagcagctgcagtttggccctttgcaagtggtaatacgtagcacttattaaattgtggccatctaggagtaaagggtttgaactcctgaaggactggcggtccatcccagagagcactttattgtttagaaagctctgagaagagggccgggcatggtggctcatgcctgtaatcccagcactttgggaggctgaggtcagctgatcacttgaggttaagagttcgaggccagcctggccaacatggtgaaaccccatctctactaaatatataaaagttagctgggcatgatggtgcatgcttgtaatcccagctactcaggaggctgaggcagaagaatcgcttgaacctgggaggcagacggtgcagtgagccgagatcacagcactgcactccagcctgggaggcagagcaacactctgtcctgcacccccccaaaaaaataaaaatgaaaaagaaagctctgagaagaggatccagaaaatctatattagggcagatgagtagtccatagagcctcaagtctgtctaaatatgacacttcatgatctattttctaatgtaggatattcctgctctataatattattctcagagattaagattacatactgaattacctggatattactttaatcaaaaccctttgtgcatttcatgttgtgttatggaaacatgtttaacttgcttatatttttagcaatgaggtccaattttaaaattgtgatatttttaaaagagtgaaataatgtatcaaaatgttttatttcatacaaaactttgtgattggcaggatattctcattctttcaacaactcaagaaaggaattgttgttttttgtttgctaactgagtttagatggcatagatcttaaagcctgtcaaattaataacatacttatactgtttaatatcatgctgcagatgaaaattaggatacagattgttaaggttttctgttgcaaggtaggtttataatataaaatattaaaactaagttttaaaaatttggttcatgatattgcattccttcacacaatagtcttgttattattcattgtgggggtattttaagagatatatatatatatatatatttttttttttgctgtttttgtaggcaatccctattcaacagaggaaaatgggtcaacttgcttctggaattagatcatcacttcttcctacagattatctggttgaaattaacaaaattttactttgcatggatgatgttgaattatcgcttaatgttccagagctcaacactgctatttacgaagacttctcttttcaggaagactctctgaaggtagacctctgggcactgtgtttgaatggccacagttaatgtagaagtagaggaagaaatttgttcttgtgcctacttagatggtctatatcttttacaatttgtgccaggggattaataatatgtatgactagtaaagctttcctatattgtcaaagaaaatatattaaattttgaatttttaaaaagtgggtatggattgttaaatgtgcacagttataaattatttgcaacatcagagccttgtttaaaattaaacagagacatagaccaccttcctgtcttataaactagattgtcagttgatgttaattgtcagcatttatcaggcaatctataatggtttaaaattggccagttgaggtatggaatggcatcttgattgtaagttaattaaacttaaattctagcaaggcattttcatgtaacttgattgcatttatatgtaaaatcacaataaattcactgataatatggatttgatagtgcattcctctcatttaaactaacattattagatatttgaaaatatcactatttccagcttcaaatgcctcattacctatagagaatgttactgaagcctttcatgtgttctgtacaaatgctactattgtgaggactttttttcctgccttgagtatattatgtagcatattccacacactttggttaaaacagagtatcatttaaaaaaaaaaagttttcagttttcatgattaacaatgattatgtctcattattatttcaaatgagtgttctacaatataaatatctggtcatctgtgattcctttttttgttactttgctggattttgttaatctatgacaatatatttttagaatatcaaagaccaactggacaaacttggagagcagattgcagtcattcatgaaaaacagccagatgtcatccttgaagcctctggacctgaagccattcagatcagagatacacttactcagctgaatgcaaaatgggacagaattaatagaatgtacagtgatcggaaagggtatgtgtaaatgaaattaatatttaatttaaaaaaatgcctgcaagttcatgggcgtgaagaagatcatgtggacactgagattaatgagaacatgtttcatatccttgtaggatgccctattatttttttttcttttaagaaggagtcttgctctgtcacccaggctggggtgcagtggcatgatctcagctcactgcaacatttgcctcccaggttcaagcaattctcctgcctcagcttcccaagtagctgggattacaggcgcacaccaccacgcctggctaatttttgtatttttagtagagatggggtttcaccatgttggccaggctggtattgaactccggacctcaggcagtccgccttgccttggcctcccaaaatgctgggattacaggtgtgagccactgcacccggccttatgccctgtttaataaattgtgatgagtatagttccttaaaggaggaatgtgatcatgtatagatgaccatttataacataatatcttaatgatatggaagcacttctaatttttagtgtctaaatagtgtccattctctttaaaaaaactaaagaaatttttcattaatgttcactttctcagcacacttgatgattaatgtgagtgaagaacagaggcagctacagataattagaatccatatatagtaccaaactcttttttatagccttctgtttaaatgaatgcttttgagccttcttactagattttgaccaggactattaataggtagaaatgaaaacaggcaagatttttgccagtagctgtggatgtgatggaaaggcaaataagttatgaaataacccagtggaaagcgctgtataagaggaaagggagcacagaataatacattgggtaacttgagagacatacgcacaaaaactaggcatcatgttccttctctttttttctattttagcctacatatttcaatgtgactaatccttgaaaagatagcttttagtggcctttggtatattcctttgtttggattttacaaattttctctttgtacctttggagaacattcttttacatacatctttatccatacttatatttcattaggcttgatcattagatgaagacaaatttctttaaaaataatgacattttaaacccctgtattatatcatgaaattggttactatacccctgccaacagtatttgtaaaaatatccttctttttgagcccttactaacattgacaggttttttttttattatttaaaaaaactttgccagtttaatagtgatagattacatctcaattttattttcatttttaaatttttagtgctactaatttttgtacgtcaattttgtatcctgaaactttgctgaatttatttaccagttctaggagctttttggatgagtctttagggttttctaggtatatgatcatgttaccagcaaacagtaacagtttgagttccttttaaccaattcggatgccctttatttctttctcttgtctgattgctctgtctaggacttccggtactatgttgaatgcaagtggtgaaagtgggcatccttttcttgttccagttctcagggggaatgctttcaatttttcctcattcagtataatgttggctatgggctaaaagtcatagatggcttttattacctgaaggtatgttccttctatgccaattttgctgagaattttaatcataaagggatgctagattttgtcagaggctttttctgagtctgttgaggtgatcatgtgatttttgttttaattctgtttatgtggtgtatcacatttattgacttgtgtatgttaaaccatccctgcatccctagtatgaaacccacttgatcatggtttattgtctttttgatatactattggattcagttagctagtattttgttgaggatttttgcatctatatcagggatttggtctgtagttttcttttttgttatgtcctttcctggttttggtattagggtaatactggcttcatggaatgatttagggaggattccctctttctctatcttttggatagtgtcagtaggattggtaccaattcttctttgaatgtctgatagaattcagctctgaacccatcgggtcctgggcttttttttgctggtaattttttaatcatgattttaatcttgctgcttgttattggtctgtttagagtttctatttcttcctggtttaatttaggagggttgtatatttccaggaatttatccatatcctctaggttttctagtttatgcatgtaaaaatgttcataatagccttgatcttttgtatttctatggcatcagttgtaatatcacccattttgtttctgattgaactgatttggatcctctctcttttcttggttaatctcaccaatagtctgtaaattttatttatttttttagagaaccagctttttgtttcatttttttttgtatttttgtttatttgtttcattttcatttagctctgctctgatcttggttatttttttttcttctgctgggcttgggtttggtttgttcttgtttatctagttccttgaggtgtgactttagattgtctatttgtgctcttttagactctttgatgtaggcatttaatgctatgcacattcctcttagtaccgcttttgccatatcccaaaagttttgataggttgcgtcactattatcgttcagttcaaagaatttttaaatttccatcttgatttcattgatgacccaatgatcattcaggagcaggttatttcgtttccatatatttgcatggttttgagggttcccttcagacttgatttccaatttcattccactgtggtctgagagagtacttgatgtaattttagttttcttaaatttgttgagacttgttttgtggcttatcacatggtctatcttggagaatattccatgtgttcatgaatagaatatatattctgcagttgttgcatagaatgttccgtaagtatctgttaagtccatttgttctagggtatagtttaattccattgtttctttgtcgactttctgtctgggtgacttgtctagtgctatcagtggagtattgaagtccaccactgttaatgtgttgctgtttatttcatttcttaggtctagtagtaattgttttacaaacttgggagctccaatgttaggtgcatatatatttaggatataatttcctgttggactagtctttttatcattatataatgtccttctttgtcttttttaactgctgttgctttaaaatttattttgtctgatataagaatagctactcctgcttgcttttggtgtccatttggatggactgttattttgcacccctttgccttaagtttatgtgagtttttatgtgtcgggtgagtctcttgaagacagcagttacttggttggtgaatttttatccattcttctattccgtatcttttaaatgaagcatttaggccatttacattgaatgttattattgagatatgaggtactattctatttatcatgatatttgttgcctcaataccttggtttttttttttttttcattttgttattgttaataggttctttgagatctatgctttattgttgttgttgttgacaggtcttcttctgtcacccaggctggagtgcagtggcatgatctcggcttactgcaacctctgcctctcaggttcaagcagttctctgcctcagcctcccatgtagctggggctacaggtgcccaccaccatgcctggctaattttttttgtattttttagtacaggtggggtttcactgtgttagccaggctgacctcaaactcctgacctcaggtgatccacctgcctcagcctccgaaagtgctgggattacagacgtgagccaccacacctggccaagatttatgcttcaagaagattctattttgttgtatttctaggatttgtttcaagacttagagctccttttagcaattcttgtagtgctggcttaatagcagcaaattctctcagtatttgtttgaaaaagactatctttccttcatttatgaagcttagtttcactggatacaaaattcctggcttgtaattgttttgtttaaggaggctgaagataggaccccaatctcttctagcttataaggtttctgctgagaaatcttctgttaatgtgatagattcttctttataggttacctgatgcttttgcctcacaactgtcaatattctttccttcttattgactttacgtaacctgatgaccatgtgcctaggcaatgatctttttgcgatgagttttccaggtgttctttgagatttttgtatttggatatctagatctctagcaaagccgggaggttttcctcaattattcctgcaaatatgttttagatacttttggatttctcttttacttgggaacacaaattattctttggtcttttaacatattcccaaacttcatggaggctttgttcattttttaaaattcttttttctttttctttgtcagattgggttaattcaaaagccttgtctttgagctctgaggtttcttctacttgttcgaatttattgctgagactttccagtgcattttgcatctctctgagtgtgtccttgatttccaaaagttgttttatttatgctgtttatttcactcgagattttttccttcatatgctgtgtcattgttttgatttctttaagttggacttcacctttcactggtgtgtccttgattggtttaataatcgaccttctgaattctttttctggcaattcagagattttgtcctggtttggatccattgctggtaagctagtgtgatttttttttttttttttttttgagatggagtcttactctgttgcccaggctggagttgcaatggcacaatctcagcccactgcaacctccgcctcccaggtttgagtgattctcctgcctcagcctcctgagtagctgggattccagacacgcatcaccacaccagcttatttttgtatttttagtggagacagggtttccccatgttggccaggctggtcttgaactgctgacctcaggttatctgcctgccttggcctcccaagttgctgggattacaggcatgagccactgcccccagcctagtgtgatctttttgggtattttaaagaaccttgttttgtcatattaccataattgtttttctggtttcttctcatttgggtagagcatgtcagagggaagatctgggaatcagtggctgctgtcctgattcttttgtcccatgaaatgcttccttgatgtagtgctctcctccttcccctagggatggggcttcctgagagctgaactgcagtgattattatttatcttctgaagctagccatccagcacagctactgggtgctgagcgggtactgggaagtgtctgcaaagagtcctgtgatgtgatgtgatctgtcttcaggtctctcagctgtggataccagcacctgctctggtggaagtaacaggggagtgaagcggcctctgtgagagtccttggttgtattttggttaagttcgctggttttctgttggttggcccccagccaggagatggtgcttacaagagagcatcagctgcagtagcatagagaggattaggcggcaggcagggccatagagctcctaagaaattatcttctttgtctttggctactggggcgagtagagaaagaccatcaggttgggcagggttaggtgctgagtcagactctccttgtgcatggcttgttgtggctgctatgggggatgggggtgtggttcccaggccagtggagttatgttcccagggggattatggctgcctctgctgcatcacacaggttgccagggaagtgagggaaagcgtgcagttgcaggcctcactcagtttccatgcagcccacggcccaaaaggccagtcttagtcctatcaggaaccccttccgccacccccacacccccactggcccaacagcattgggtttatttccaggcagctggtgagcagggttgagaacttgccccaggtgacaagtctcccagctgagaacgcaagctgatctccagttcctcggctctcccatgcagcatgcagcagcattccacctccttcaaagggtctgtagattctctcagttttcctggtatgttcctgcggtagttcttggaacaaaagtccactatgtgtctgcacatgctgctgtttgtctgagtgggagctgcaagttagaccttcctcctatccaccatttttttttctctctgtcactgatgatacattctaagtttaatgtttgtattttcaaagtctttagatctttggaacagtcttatagcatctcgaatttggaaattgtgattgttgtgtagttattgtgaatttttgcaaatgataatgagtgtcaatatcacctcatagtgccttttttttaagtgcttttctttttccatgctcaatagaaaattgctttactgtgggcagtattagcaaaatgttaaaagtaattttcatggagaaagacgatatacacattatttaggggttattgatattaggagccattttatttaaaaaatatatattttattaatattgttaagatctcagagatcacttctaaaactcagctccattactcttaaacaaaaagataggagaaaaaattatttaggatcctggtccaataaagcttttcctttttatgcttatttcatgtatcctgaatataacaagcactgggttttactttgccatctttaaaagagtttggtttaaacagaaatctcaatagccctctgtcttattgcataacgggctctgcatgcaatttcatactttgctgtatttaggtaaatgggaccctcaggaccagtcattacccgaagtacattaatctgctcaggcagccgttataagataacatagactgggtagcttaaacaacagacatttactttcccacagttctggaggctggaagttcaagatcaaggtgccagtagatttggtgtctagtgaggtctctcttactggcttgcagatggccaccttcttgctgtgtcctcacatgagagagctctgtggtgactcttccacctattataaggacaccagtcctttcagactagagccccacacttatgacctcatttaaccttatttgtgtcctggaaagctctatctctaagtacagtcacactgtggggttagggcttcaacataagaattttgattggacataattcagtatataacatatagatagaggggtatacgggcattttgaagtgttttggccttttgtgctttattcttgccgggaactaagtgttctggtagtaaaacaacatatttttccccaagaaaataatgaatcatattttatatttcacagtatttaaatgttaaatgtataaagttggatgcgttaacatgcctacaactaatcgatcctgatttttcaagccagaaaaggctgcatctttttagttaaaaagctgctcgagtgtgtgtgtgagtgtgtttgtgagtgtgtatgtgagtgtgcatgtgtgtatacgtgagtgtgcatgtgtgtgtgtatgagagagaggatttggtagctggtggtgtgagcagattgctttgcccttgttatgatgcatatatctctaggaggaattattacctgtatcccactacgaaaattggttttgtggagcaataggctgtgaattcagttgtttgaggtctttctgtttaaatgaaatttgattttcttttttagaaaaatggctttaggcagtcctggaaaatttggaaacctattttattttgtgtattgtcctctagttgttttgacagggcaatggaagaatggagacagttccattgtgaccttaatgacctcacacagtggataacagaggctgaagaattactggttgatacctgtgctccaggtggcagcctggacttagagaaagccaggatacatcagcaggtgagtgctttctgttagaggagggggactgcacatatggttagtgtatgcctgttaagacagatttcagaagtagggacaaaatatattaatttttcagaagtcaatggacaatttgtaatttttgttccaattcttgttaccagttataaaagtttaagaaattggtcaatcacaattttcaatcaggatttcaaagaaatttaaataaaaatactccttggtggctaatgtgaaaaacaattttatttaaacaattttatatttagaataaaatttgtaaactgttatgcctaagactataccaagaacagaaaaaatatttgcatgcctcacctctgttttttgtacttaaacacttaggcatctcatttttctttgtatcattgataattatcataaagtaaattattctggagcgacagcagggcagctgctcatgtaagtctaattcagtcttgggaaaatataacacaaagttagttctgataacaataggtctttaaaaataatggtagaaagcacacgcaatttcaattctaccattgataaaaatattttctcttttattaagttttttaaatgtattttatttagaaggacatgacaatttaaagataattcatttgtttttcttataaatgtgttaatgtggccgggcgcggtgcctcacacttgtaatcccagcattttgggaggctgaggtgggcggattatgaggtcaggagatcgagaccatcctggctaacatggtgaaaacccatctctactaaaaatacaaaaaattagccgggcatggtggaacgcacctgcagtcccagctactcaggaggctgaggcaggagaattgcttgaacctgggaggcagaggttgcagtgagccaagatcgtgccactgcactccagcctgggtgacagagcaatactgtgtcaataaataaataaataaataaataaatgtgttaatgcatttttcttatttttggagttacagataagtgtttaaatttgacttgaaaatattcattcaatctgttacttaaacatttgtagaccagtgtattagtctgttctcatgctgctaataaagacatacctgagactgggtaatttataaaggaaagaggtttaattgactcatagttcagcatggctgaggaggccacaggaaacgtccagtcatggtggaaggggaaagaaacatgtccttcttcatatggcggcaggagagagaagtgctgagcaaagtgggggaaaagtcccttataaaaccatcagatcactctcactagaacaacacgagggtaaccacccctgtgattcagttacctcccactgggtccctcccttggcatgtggggattatgggaggtacaattcaagatgagatttgggtggggacacaaccaaaccatatcaaccagtgaagcaatatcttagtaaaatgtgcatttaggtttacttgtatgtggtaggacacaaggatataaggatttattggggtatataattttttaaagcaatgccttcaagcacttgcttgaaagaagatgagcaattcattttcatcaaacatgattgatgcttatgctttaatgtaaacagctgttattcattttagttattaagctgccctatttccttgtattttgcctgatgacattcatgaaggtgggttagatttcaaaataaatttcatttagcatgttcattgaaatgtaattaaattgttttaaaatgccttttttttctaacataaaatatctttccaggagtttgtttctttcacacttaaattgataccacaatacttgggtggattcattgcatcagaatcatttacttattagtgaaactaatcttgagttgtgctctgttacaggaacttgaggtgggcatcagcagccaccagcccagttttgcagcactaaaccgaactggggatgggattgtgcagaaactctcccaggcagatggaagcttcttgaaagaaaaactggcaggtttaaaccaacgctgggatgcaattgttgcagaagtgaaggataggcagccaaggtgatttagctatgattgtttgcaggcacaggagtgaacatattttggatagaatcttttaagatgcaatctaatgagttcttttattgtttgacattataataggaattttactgacatttaagacctccactgcccacgttctcccttcctgtatttttaggctgtccataaagtctcacttttctactcaaatgctacatatgtaaaaaccaaacacctttattccttttatttacaactgcttattatgatatggtgattatgatgggaatttaaagtagttgaaataactgaaactccaggtttcaggtttgaaggtctgggttcaagatcagaccttccctttgcttatttcctgattgagcctaccttagtaatacgtctcactaagttattttggtgtcaaatgttgtgttctattcatgctttgccaataataaagttcttcatctatgtaatataatataatataatatagtattattaatttttatgtcagattatgttacagtgactcagattttatttgggcatcttccagttgcaaatttgttttgcaattggaatataatgcccaacactatagacactttccatatttaaaattatttgacattattttctgagacagtcaagatttatgaatgatttctactttgtttcatatattccgtcattaatgatcttttttgtttgtttgtttcttgttggtagtttagggttaaaaactccacgatttttttttctgttaattttaactctgttgatgaagtattattttagtgataagctatcattttgtgaaaggccaatctaatactttatcaggtccagtattattatgcaacctaaaatattcaagtatcatgtgacctacagttgcttttcatttaaaaaatctattattttgtgtgttttggtaagagacaaataataattagtacgttttggttgagagattaccacatggcagagagagtatctggcaccttgcacacattgccttgtttaggagtcatgactcacctcttaggggactgttaagccttgtacagctttagaaactgaggctaagagaggcgaggttaagtaacttgtccaagatctcatagaaagtaagtgatcatactgtcttatgctctcaatattatgctgtacgaacttggaaagagcacagaactctctggccaaagtgtcttcctctggaaatgagaactatgatatcaccacagaggactgtcatgaggattaaatgcaatagtgtttggaaaatgtgcatgccttgactattcatagtaaacacttaaagtatctatttcttatgaaagcaagttatcttagaacttattctctaagcatattgctgaattttgccaatgattgattaatgacttgatcgatatttattgagctctatgtttagcactgaagatacaagtatgattaggaactcaaagactaagaagaagaaaatgatgaaagaaaacatcattaaaaagataaagtgtcacagaggcagatatgatgcgctgtggaatttaagtgtcacagaggaagcatgccgaagctgagttttaaagcatttatagcaattttctataaatttcttctagggagggccttctaggcagaagaagtaaaacagcagaggtgggaggcataaatagcatcgtcgtgtgagagatctgcaaaggattgaaaggagaggagggttcaatgaccaggggaaggattggaaaatgaggtcccataagatcttatatgtcatgctattcagtttgcatggagggtcttagcttgaaatgatttatctcctagacctttattggttttttgagacagagtctcgctctgtcacccaggctagagtgcagtggcgtgatctcagctcactgcaacctctgcctccccggctcaagcaattctcgtgcctcagcctcctcagtagctgagatgacaggtgcctgtcaccatgcctggctaattttcatatttttagtagagatggcatttcaccatgttggccaggctggtctggaattcctggcctcaagttgatctgctggccttggcctctcaaagttctggaattacaggcatgagccactgagcctatcctctcttatacctttttaaggaaaaacatgtacctgctgggagggttttaacaataaatgcagaaattcttctaaaggtagatatctgtggagtgtggtaattacagctcctaaaactaataaggtgaagctaatacgtgtttttactcattttttggaagtgaaaagaataatgaatctcttccccaacagcttatattttgactaaaacaatatttgtctttgtaaattaacgctaaacttcaccttaggttggtagtctatattaaattgggaccattttgggtagattgtatatatgttgttaacaaagtaattgagaattatcacacagttcaatttgtttttgtattgagtgcctgtagttaagtatttgcatagttcagcaacctgcagagttatttcttcccttttttggagacaaggtcttgttctgatacccaggctggagtgcaatggtgcaatcgtagctcactgcatccttgagcccctgggctcaagcaatcctctcaccctagtcttctgagtagttggggctgcaagtgtgtgctaccacacccagctgatttttaaattgtttgtaaaaataaggtcttgccatgttgtccaggctggtctcgaactcctaggctcaagtgatcctcctgcctcagtctctcaaagtgctgggattacagccgtgagccaccatgcccagtgggttattccttagtgagcaattgtttcttctgttagaacatgaatttataatttgtttttactcttggggataatatttaaaatgtagattatatttagctaatttgcagatgaaaatattgggtgactcaaatatatcttattgaaatcactttataatgctagttttcttcatagttctgttttgaaagtactaaattagtcatgatcttgaaacattggacgtgaaatttcaactcttttttagaaacaaaggcctataatagtattttgggtgtttccaaagttgtcatttaagttaaatacttttcactatggagggtagattacttgttttagtcttagtaattagtgctgttgctgtatttatttatttttaatcttaaaggagcattctttcttgatggatacttaaaaattatgattttgtagtgattttcatttttttaaacattatacatcaaatattgactgtttattaaatatagaagtattatctaatattttattacatgtattgcacgattatgtgagaacttttgtgattaaaaatgaaaactcctagctgcaaaaacataaattcttattaggaatgatacaatacaatttatttaaaaattgcattcagtttttaaaccagcagttaattatagcagctataaaaataaagataccaccaggcttttaatagctttcaaatccttttaaaaaacacataatcttatttgtcatatgagttctaatcatattcctctcttctgacagatggtttatattcttataaatgttattcttataacactataaagatctaattgaggcagttccttttttatattcatttgactgttttccttgcatcatttaaaatttttgctttgtttttttctatatctctttttgtaacagtgctctattcaaatataatagttattttaataaacaagccaaattcacatgtttcttgtcttccctaatacttgtaagattctcccattcttgataccttgctttgttcttattctttctgttctatgaataaagcagagtaatagttaccacctaatgtgataacatgtcatataatgattcctttcaatattcgtgaaacactcaaagagaattatgctttttccctattattttagataaagacatttttcatgttttaaaaaatttccattatgttgcggagtggtatctaactgtaaaaaaggcttttgtattcaatttctacataactttttatgatgagggaagataatattctttagtttcaatgtttttgaatttaactaaggaaaaaagcttcttggtctattattaagcaatctttatattgtagaatatatacattgtttcacttaaaatatatattaaaataattattagaaattatttattttgggaaatatttagtcaggatattcaaagcaaatatgtaaggttctgcttaattggacagtttttcctcaatatttttaaataatatattcttttaggctaaaaggagaaagtaagcaggtgatgaagtacaggcatcagctagatgagattatctgttggttaacaaaggctgagcatgctatgcaaaagagatcaaccaccgaattgggagaaaacctgcaagaattaagagtaagttgtttatttctgtctatatgccttttggtgcccgaacattatacttcagagtcacatactgcgtgtctcaagaagaaaagggaaaagaaactttgtactttttggtaaatgtggtgaacctgaaagaggaatatcttttattttttaaagagcagttataattttggtcttgcagagcttaaacttcacttatgtaaaaagaacaaactattatggtgtcagtattagaccaaaggtttttaggatattgtaaactgaccttatcattttaaaatacaatagggctatgaaatatcgttttttgtttttagatttggaagaaaattactgattattgtctataaagctgcaaaactcaactttatagataatcagtaattatcagagtgacttgctgaggaacaaaatgcagcttgcaataggtttagtgtcatggttgtattaatcagattttctttgttggtttgcaactaacaagtattgtttatagttgtatatgtatataatctataaaaattcatacatatatagatgtataaatatatccaaatatccataaattttgtattcataaatatttattttttgtgttaagaattaaaatacttgttgcagaacactcagcataatgtgctcacatttttttttaaaaaaagaaattgtgggctgggtgtggtggctcacgcctgtaatcccagcactttgggaggccgaggcgggtggatcacaaggtcatgagatcgagaccatctggctaacatggtgaaaccccatctctataaaaatacaaaaaaaaattagctggccgtggtggcaggcgcatgtagtctcagctactcgggaggctgaagcaggagaatggcatgaacccaggaggcagaggttgcagtgagccgagatcgtgccactgcactccagcctggctgacagagcgagactccgtctcaaaaaaaaaaaaaaaaaagaaattatgagtgtgtattcatacatgtacaagcataagtgtgtgtgaaaggttacttactaattcagagattttgtctataaaggagtatgattgaagcattttgagaaagaaacattgaataatgatgaaaaatattttgtggaacatatattaagttttctttttaaaatgtgacaatatctaacaagcttccttttttacctaaaaatttcagtggtttttttgggaatgtctcttttgtaaacaatttgaggagagttagaaaaggtggaacagtatattaggatggagtagcaaggaggagataagaacagaatgttaaattagcagtgtaaaaataatatatgacccggttaagagacagtgagtaccagagagcccgtttgtgcacaggagtgcaaaaatacacacagaaggcatgtgctcactcccttcctagttatcatttgttagcatgagcttaagcttcttataagtttattttttcacttaacaaattagaaagttacatttgtaataataccaaaaaggtttctaatacagttcttgaattttcccttatctgactaccttctaaccacacctatcttttaacttctccaggacttaactcaagaaatggaagtacatgctgaaaaactcaaatggctgaatagaactgaattggagatgctttcagataaaagtctgagtttacctgaaagggataaaatttcagaaagcttaaggactgtaaatatgacatggaataaggtgtgtgtaaagttactatcacacatttctcatatttattgattttgttgtcagagatgtgggatcatgtaactgctttactttcaagtatgtccaaatggggcaaattttactaaagcttactaatgtttatattttttatctgtcatagacagaggcatatattctagaagaatactttttattttatacagaactctttggcctaggggatttatacattatatactacattaaataatgaatatatgttggaattagtaagaaaattccagtgatgatattctgaaaatgaagaccttaaaatagcattctgagccgggtgtgttggctcatacctgtaatcccaacactttgagaggccgagatggggggaatcacatgagtccaggagtttgagaccagcctggccaacacagtgaaaccccatctctactaaagatagaaaaatttgccaggcgtagtggcacacgcctgtaatcgcagctacttgggaggccgaggcacgagaattgcctatacctgggaggtggaggttgcagtgagctgcagtcacaccactggaccccagcctgggtgagacagggagaccctgtctcaaaaaaaaaaaaaagaaataaataaagaaaatagcatcctgattttgcacatgacttttcacacatgtatgtttattttcaatgatttttttcattaaatatatatttactaggttccagtgaaatgtaatggcatgtgactacaaatacaactaatatctttccctcctaccattattttttttttgccattgaaacggttaaaagtagataaagtcatagatatcttttttgtttgacctggtacacaccatttcagagtatgacgtctgtataggacattgaatggatatgtctctgtccttggtttggatggactccatatcagtcattttctctctcatcctctttaaatggtagccattatcctatagctaatgatgcaggtgctttattgatctggtctctctgattgggaatcactgcctgttgagtcactgtgattcacacatgtgtatctctggtctggacctttctccatactctaaacttgtgtatgcaactacctgctcaacatctctccttaaatgtctaataggcacctcaaactaacatacacaatcgagcttttgatatccctctcccttctgtgccttaatatacatctcccaccttagtcaatggaagtttcatcttattattacttaagtcagaaatattggagtcaatcctatggtatatgaattctatcacaaaaagaaacaaagaaaacccccaaaccaaaaactatacctcagtcaccattagcagcttttccttcaaaatacgtatctactggatggatggtttattggatagccagatggctatgtgtgataaggcaaatgtagcagaagtttgacagttgtagatgtcagagggcacatagatatttcctctacaattctttcgacttttcttaggtcaaaaaatatcatacatttgactgcttcttacaacccccattgccactaacttgtttcaagcctgccatcatctcttgtcttgatgactacaaaggctgccccactcatctcccctgcttcttcctttgccctttgttattctgttctagacaaagcagccaatatgattggttaaaacataattcagatcaagtgacttatctgagcaaagtccaccaatggttttctatcttgctcagggtgaaagccaaaatgcttttttggcttatgaggcttctcatggcctggcgtcctgtgatctctcctacaatatccactgctctctctcccctacactcctttccagacatgttaggtcctgtgtcacttgccagaaaggttgtccatattcagtcggagcacacatatttatttaacacaaagggtatcagtgggtattctgcagaaaagggcacagttgttaatttgggtgcactatgtcagacaaagctagagctttggttattgcagaatttcatgtaaattttaatataattcactttggtgaattatgaatgtctaagaccaacaatgctcattgtgcagaaaatctcaacaaacataatttgggaaattctaacatggtttatttcattcattcatacagtcattcattcactcaataggtttttattggagtctcactttctgccaggtatcattttaagagataggaatgcattaaagagtgtggcattccttctaactcaaagagcttatcatggatgagaccagcagacaaccaattataacatccaggtagtgatgggtacataaaggtggagcacctgcttggctttgaggggtagctgtggaaggttttgttgaaaagatcacattctggttaatttacgaaggatgaataagtattggtcgggtgaagaatgagggaaagtgcagtgtagagagaagtggcaaatgaaagtgtctagaagagacagagaatgagcacagtgtatataggtccaggaagtagcccactgtagaatggaaggctgagggatgttctcagagatgagatcctggaggactcactgtgcatcacaaggaatttgagctccatgttgcaaacaatctaccactttgagggtagtgggcagctattgatgggttttaagcagaggaaagtcatgtttttgaaatattgctatagcttcactacggagatagatgaagtgatcctaagaattgatatagaaagatgagttagaatcttcagaagagtttatgaaacgggtgtcagggaagatagggataaggaattcagatgtggacatatctgaatatctagttcacagagagggctggactgaagatatgttttgggcagtctttagcctctcaaaactccatttgattcctgaaatctttggaaaccaggactcagggagagcccagggtgaagggcaagaagagcaacacagctgccctgaaggatattggtatttgatggatgggcagaggaaaaggagttggtgaaggaaattcaggagagccagccagagaggtaggaggaaagccagaattgcagagtaataacagaattcaagggagggggagtggacggcattaactggtgcacaggggtcaggacagctaaggactggttggtgtttttgatagcaatgtcagtggagttaggggctcaaacaagattgcaatggagagtgaaggtagagccagaagtttaggtcgttaggggaagaaaagtagcagagctgccattcagaataacacctcttcttttgaactacagtcatctttatttacgtagtattcttctctttctgtttgtcctgatgcggtagatttgcagagaggtgcctaccaccctgaaggaatgcatccaggagcccagttctgtttcacagacaaggattgctggtaagatatgtttatctttaacaaagttttttaaaaaatcagtatgtaaaattttgtgatatgagcctcatacatgaattagaaagacttagaaacgtcgtgccattttctttatttaatctactttcaatgatttggaaagaacatcttctttaaacccaagacacatttggctgcccagtgtgggtaaggcatttgttctcgcggcagataaggctggcctttctctggactccagtgctacctgggcatccacaggtcctgccgaagggaagatgagaggctaggtgcaaaaactggggactagttttctgggtccaggcagcttttcaggaaatcagctataacttgttgtgttaacatgagcttggttaacatatgtaattagaccctgatcatgactgagaacaaaaggcttagatatcctgggaagcaggtgggggatggatatttagaagcattctccaacctaggagacaaatacttctcacttggatgtggagaaagaagaatgttttctcactatttccttctctctttatccagattagatcgcaggctcctgccccatagccactgttgccactgccttgcaagttttctgaaccatcatgccctgctcttcctctgttgagtcacctggcaaaaccgcaaatgtgaccaactctaactgtccactcactccctgacagctgcttctgctgattctttttattgctcctccccgcttttttcttctcccttgtccttctcctcctccttgacttccatgtccaccttctactttctacctcttctctcgtcctccacctctacctcttctacctcttttttttgggagggttctttttatttctcttattcctcttatttttcttttcttttccttctcttcctcctcctcccctcaagttttgaaaaaagtgatgacagacaatatattttttttcatttttcgagattgcaagctaattgaggaccaagtttgtgttttttattacttgtatttctggaaatttgcacaaaaagtacctggggcctgatcaagtttcttgattaatattcagaacacttgagttgacatttgggtactgctgctttgcaaatacaggctcaactccataatcatagggaaagaatttgatgcattttataaaatcgtcatgggttatcttactttttaaaacctctatatggtaaaggagcagggaaaatttgaatacatatttagaagtataaaaagctaacagcaaagctacaacttccattaggtggatggctcatttttaacaggatattcgtccttgggataggcctgagacctgaagctaatcttagtatgtctctctcctcctacgcagtgttttaattcagttccttctttttaacattttatttagaaaataaaattaaccattttaaagtgaacaatttggtgacatttaatgcattcacaatgttgtacaaccactatttctatctagttccaaaatatttctatcactccaaactaaaacctcttactcattaagcagtttcttcccattccctcctactcccagcccctggcaaccaccgatctgcattctgtttccatggatttctctattctggatatttcatataaatggagtcatacgatgcttcttttacttagcataatgtttttgaggttcatccttgccaacaccttgccgactgtactcatttcagagctatgactattcatttcaaataagcactcagcgctaagagacagtcctaccgtactttcttctgagtactccttggtactcatttctcaactagtgacctcatctcattttcaaaagaaaaaaaaaacctttttcgttttcccaccagagaatccatcaagctacctgcggctgtacccatatactttacacacttccttcctattcagtgaaagggttattatctcttttcctaagaccagctcctccacttatgcataggatcccatattctctgggctgcttacgtatcctctttctctgatagctactagatcatccttattgccataccttttgaagcatgtagctctagtctactcatttaaactgatgtacagtattacataacattggatatactacaatcctctaaattctcttttctacctatgcttaccagtcccagaactgtagacatttttttttagatgattcacccagtccttaggccaataaacttgtagtcaacctcaactcttctctggaattaatattcaatccatcagcaagtagcatcatttccatgttccattccacctacttccgtggtcttgaacacccttatctttctatctagattattggaatatgctcctaactcataatcctgattttattcttgcctcagtacttctccatgacctattcctctgatagcagatagagtgattcttttaaacgagtttgattgtgtcgtttctttgttcacagtcttttaatcacttccatccacataaatgagttccaaagtctggccttagtccagaacaccatgcatatctgcctgtctctttaatcacatttcttactacttttccctttgttcattctgtttcaaatacactggtcttcttgctgtttcaaacatgccaagaacgtaatcatttctggtctttgtgcttggtgttccttcttcttgtcttccccaaatgttcttctcttagatattttcatgtttcacatactcacttcctttagttctccttcagatatccctttctagaatagccctttcttgcccacaatatctcagatacaccctgtctctgtcttcttgtattgattttacttcataacacacatccattttcctgatagaatgcaagctctggcagggcacggtggctcatgcctgtaatcccagtgctttgggaggccaaggcgggtggatcacctgaggtcaggagttcgagaccagcctggccaacatggtgaaactctgtttctactaaaaatacaaaaattagctgggcgtggtggcgggcgcctgtaatcccagctacttgggaagctgaggcaggagaatcgcctgaacccaggaggtggaggttgcagtgacccaagaccgtaccattgcactccagcccaaactttgtcttgcacactctcatgcctgcagcgtctagaatagccccttacacataataggttcttaataggtatttgatgaattaaaacaatgaattttttttatctacaaaaaaagttaaagtgaagatggggcagaaggatgtgtgagatattctgtagggtgtatatctagtgatggaatcactgggtttagcatatgggtgccttctacttcactagctgccattagggtgctgtctggattacttggcccagtttacactgacactggctgtgtgtaatgggttcttattgttctacagcattaccagcacctcaacactttgctctcaggacccctttacacttgtaaaaattattgaggaccctcaaatagcttttgcttttgtgagtgatagttatccgtatttacctaactagaaaaattttccattaattcatttattaagttgtttaaaaataataataaagccattatatgttaacaaaaatagcatgtttttgtaacattagcataagatgctgggcacagtgaatcatgtctataatcccagcagtttgggaggctgaggcaggaggatcacttgagcccaggagtttgagaccagcctgggtaacatagggagaccctgtctctacaaaaaattaaaaataaaaaaaattagccaggcttggtgatgcaggcctgtagttccaactaatcaggaggcagtggtgggaggatcacttgaactcaggaggttgaggctgcaatgagctgtgttcgtgcctctgcttcccagcctgggtgacagagtgagcccctatctcaaagaaaaaacaaacaaacaaacaaacaaacaaacaactctgttttctaaaacaaacaaaatcctggaaaagctgcagttttatattttttgaaatctcttaaatgtctagtttaatagaacacagctgtattcttatttctgcttctgcatttggtctcttgtgatgtcacgttatgtagacttagataaaacacactgtacacgtgggagagactgagcctaaaaaggcaaataatgtgctgatgataatagtgtaggcatcttaacctagagcttctcagatgtcacttttctgatggtggtcctgtggatgtagggtatttcattttaatttgtactatctcagttatagaagaggtcagacatttatttcacatttttatgtttattgccttttttatttcctcttttgtggattgtctttagatgattttttaagttttagaaaaagtattttggctatcagttctttgtctgcaatgggcattgcaaataccatctcctttcatctttcaaaggcttttaaaatctttacttatggtgctctttggaattcttaaccattaatggtttattaatagcttcccttttttgtgttttgtttgagagctacttcagtcctctgaagtaataaaagtattccttatttttaactaacaattttgtttttcatatttaggtccttaatccactaagaattaatttttctatggtgtatgtgaggttaaaatcagtcccatcatttccctgctgcagccgtggtgactcacttaattgaacagtaaattcttcttcattgatctgtaattcagtctctgccaaggtcagatttctctgccacctacacattgtgactcttctcttctgttggtctctttaaatgtctcagtctataatatactgagttaataattattagctaaataatataacttaatatctgggagggcatattcctctatcaaaaaataatttgactgttttttgtccttttctcttcaatattaattttataaccagaaatttgaattaatgattttgttacattcaagcctgttgggatttttattaggattgtgctgaatttacagattggctatacattttagaaaattatttaagcctcatctaatatatcatacctgaagtaggttacagatagttttaattactaattcaactacttattgtatcaaaaccaatcaatttggcaatgaatattaaatacatacttttttttgtattttctgactcagtaattctacttgggaaatctatgctaagatagagatcagaaatgtgcaaaatactctacatgaaaagatattctttgcaagttttttaaaaaattaaaataaaatttcaggagcaatctaaatatccaagggttaaataaaagtgaatatgggtataggttattacataggtattcataattgtgtttactaagaataaaatatgctcacattataaagttaaatgaaaaaaataaaaaattatgaataagttggctttataattaaaatcatcttgccaaaataaaataatacttccagttctcccacatttgtacttttaatttttctcagtgtcagtgctgattatgttatagaatgttgcaaaactgttttgttggcttgatagctaccaaagacatatggatattacaggtaataccatagccatttcagtatgaaaaaataacctcttagaattttttttacttaaactaaattttatttaaatacacatacacgtgtcaccatgacaccaccataattaaaacatcctgttgattaatttctcttttgctacatttttcatttcagctcatcctaatgtccaaaaggtggtgctagtatcatctgcgtcagatattcctgttcagtctcatcgtacttcggaaatttcaattcctgctgatcttgataaaactataacagaactagccgactggctggtattaatcgaccagatgctgaagtccaacattgtcactgttggggatgtagaagagatcaataagaccgtttcccgaatgaaagtaggtgcatagtgtaaaagcttgtcatggaaacgccacaacccagaggtagaccagatctgtttgaatcccttttgtttatcctaaactatgagagaatgaggtttaaaaaattctgtatctgtcaaacaaccattcagggctaactacaaagcatagagcttttcttgcatttatactgttgtgatatgatcaggtttactgacttaaactaaagacccagtgcatttttaaaatctaaaactgataccgtaaagctaggcacattagtataaatataagctggcgttagcatttcatgcctgttgtgtgatgtaggataatctcctaaagtgcctttgcaacttatatttcataatgagattaatttctgattttaaaagtgaatatctcctataactttactactatacatgtaccatctaatattcatttgtaaaaattctttttccctatttagtgtgtgctaagttctgggctgtgagtggtacaaggatactgacaagaatattctaggtagaaattgggaaactacaatgaaataataataacagctcttgctaaattttattaagtgcttcatgtgtgctggtcatttttctaagtattgtacacgttatctcattcaattctttaatagtcttgtgagataggtactgtttttatccccacattacaaataagtccacaccgaggcagaggcactgagtgcatatgagttgacaaattactgtagcaaggcaagagtctaataaaagcctcaggagaagtacaggcaacctgttgggggagccaggatgaggaaggggatcacttctccagtgatggaaagcaaactgtgtgggattttggcatctgggacaaagtggtgacattcctggtatagggaacagagtgaataaagtcatgtggtacaggaggcacaaaggacagtagggccaacatttgtgcaattaagaaatacagtgtgaaacaaggcaggaaaagcagctcaaattccctttgtgaaggagcctgcaggctgtgcaaagccctttggatttttagtctgtaagcaattggtaaacatcttccttcccatttctttttctttttaaaattgtgtttatgaactcatgataaccgtgctctgctttagtagaagactaggatggattggaggcaagaaatgcataaatcaaggcaaagagccctttctgaaatgactaagatgatgctgttgcaattagcagaaataaggaatagaagaaattgagtgtgaatgagggtttgagtgatttagtttcagacgtgttgtggtggggagtccttatgccatttagaaggaagtgatcagtattcattaccatgtgccctgggatttaggattgaaagttgtgagcaatccatttagaagtaatatttgacaccaaaggagtagctggaatctacaaaacgggtgaatttgtaaagaggaaggactgggaaaaagtcatttgccactatttgtattttttgtaaattgctttctagtctctatgactgtcattagttctgtactgaaaacacatgattttcctgatgttgttaccatttctcccatatttattagcactgagagacaaaccatctacagcagcagtttttcgtgtctaagaggatttaatttatagttattcctcttagcacttttctgtgtcacccccaaccctatgacattagtttgtgttcgtacctgacacagaacagatatgcaagtcatcatcagcagcaataactgctaatgttttcagggcatttttcagcttttgaagggattttctttgtttaatgtcctcagactggatgtaattgagctgtcagtattttattatttcttttttgtgaaaacaaaaacacagagaggtaaagctccttgcctggtgactcaggtgctaaatggaagaactgagatttgaatgcaggatccttgactttaaatcatgcactcattttctgccacgttgctgatgcttcactatgccatagaggaggaaaacaacgacaactttgatgtcagcacaactgttttgcttattattcttctcatatggcttattaacctatccgaataatcatttctacttaacagattacaaaggctgacttagaacagcgccatcctcagctggattatgtttttacattggcacagaatttgaaaaataaagcttccagttcagatatgagaacagcaattacagaaaaatgtaagttttttaaaaaaagttatgtattatcatccactttccctgcaaatggtgacacacacacacacacacacacacacacacacaaacacattttcaaagattattcaactagaaagtaatagtgtttaatatttgttactctttatttatacagaaatgtagctttcccttgtttttatgttttgtgaacattgttacaataaccttatgaagtccttaattattaacatcacgactcttaagtaattacttacacattgggttttcttctcttaacttaggctttcttttagaggaataaaaaaaggttaaaggaactcacaagaatgcaaatcctttctctcattatactttattctctaaaatcaggtcttactgtgtcttttaactcaacccaaaattcagtccacaaatatttattgagcaactactatgtgcttatgtgactggcattaatttggggatactttagttataaatgagagaaaacaacaacaaaaaataaacatacaaaacaatagcaaacaaagatccttgcttggggtttgcattctagctcagaagcatctaggttctacaaacccttcttagtgggaatgtactaccaatagcaaacgaagtctaaattctcaagagtgacacctagggattgtcacaatctgctgccactaccccttttctcacttcagccctcagcccggcctgtaattatgctgttattccttaaaatatcctgacatttcctagtcttcttacctttatttgcattattttatttctcttggccttttcttcccaggtgcaattctacgcagcagctaaaatgtcatcccctttgtgacatctttccctcctcttctggtccctggtgaatgttaatttctatttttagttccttctatggcctttccccccattgctttattatagatcttacaactactttaattgtctctctcttccatagattgtgaatatccgtctttctgcccttgggcctttaacagtgccaatacaaattaactacctaataaatatttgtgacaaaatataaactggaaggataaatcctaatatttgtcaagggaagaaagtcagctactctccctgtaaaaagtatgttttgatttcaaaatagtcatggtagcaacagggttattataggagatacattagaaaagaacttttaatgtctaacagtgttggcttatttttactaaatacatcattttccttcttttctctttttatgaatggatggattgtgcctattatggaactttggagtgagctggtttccctcacatcacaggggagctcctctgctctagtgataccaaactattgacaagccatttccagtttgctttttctatcatcttgatgttttcttttaattattattttttccatcacctctctttttgtccaaaacttctttcaggtgtttgtttttttgttttacaagacttctcctaaatatcttccctttcccattgaatgtacacactctattttctctctatatataaatatttctgtgtgtgtagaggttctataaccttcatcactcctcattatatgaaaaacccttcccagggggaatgtattgctaccaatagtaacctcgttttagggcttaactcacaatgaatgggataatttgcctatttcttatgataaacctgtgatatttactctcgcttgatgtctttggtttcatttgtttactgttaaaggattctattagtaatagaattggtcataagtactttatgtaactttttaactgacaagagaacattatgatagatttggcctctcttccttaagtttaaaacttaagcaatttatttaaacagctaagacagaatgaaacagattgtctcattgagcaagttttaaagaatgatgacatgtaagtataacttaaggcctgaacagccttgttgatagcttttttgttttttgagatggagtttcactcttgttgcccaggctggatgcaatggtgcaatcttgactcactgcaacctctgcctcctgggatccagcgattctcctgcctcagcctcccaagtagctgggattacaggcacctgccaccatgcccagctaatttttatatttttagtagagacagggtttcaccatgttggccaggctggtcttgaacttctggcttcaggtgatccacctgcctcggcctcccaaagtgctgggattacaggtgtcagccactgcacccagccagttgatagcttttatgtttcactataaccatatattatcccaagaactttgccaaagtgttccatgataactcagctggaatgttatcttgtagttacgttcctcttgggcctggtacttaactatagcctttctttttgtctgatatccaaagcatctttcagcagcgtggttttaacattctacctacttattatcagcaggttcttgcggatattctaagttattgtttattagtacctcagttcaagattatgaactaactctgaagtgattaataaaaaatttaagtttccagccgggtgcgttggctcatgcctgtaatcccaacactttgggaggccgaggcagacagatcacgaggtcaggagttcgagacctggccaacatggggaaaccctctctctactaaaaatacaaaagtagccgggtgtggtggcacacacctatagtcccagctacatgggaggctgaggcaggagaatcacttgtacctgggggcggaggttgcagcgagctgaaagccaggatcgtgccactgcactccagcctgggcgacagagcaagactctctctcaaaaaaaaaaaaaaaaaaagtttccttagatctgtctgtccttaaaaccttgttaaaaatagagaaaggagaagagagaaagcttgaggagaaatagaaagagagagaaggtgataatgagtgaaaggaatgaacaataataaaagaggaaggacaagagccagtatggaatttttatgatgaagagctgctgggtgcacagttcatgagtctcttttacttttagcatttctcttgaacttgaatatataaaattccttttagagagttttcctgctacagtaaaacaaatgcaaaaaaaaattcttacacagttcagtttcttctaaaatcaagactgccttagaaaattctcctttgagggtaacaggtgactatctctctgtcttaaagttctgtcatgaagtactgttaaaccctaccttcatcaaaccaggtctataaatacaactgtaaatacaaaattaaatagaacagtattttctttataattgtttggcagtatcagtttataatagtagatatttttttgggagttgttttagagcactgaaaataagagttcaagatttttttttctcaaacaccgtttcagaaatatatcaattgtataggatggcagatgtatattaaaattccttcaaaatgtgtttatcagcttgccttcttctgtttatagacttatttgtgatacatttgatatatgatattttttctttctcctgagggttacatgttgggatttttttttcttttataatgctaccctcagtggaaagggtcaagaaccagtgggatggcacccagcatggcgttgagctaagacagcagcagcttgaggacatgattattgacagtcttcagtgggatgaccatagggaggagactgaagaactgatgagaaaatatgaggctcgactctatattcttcagcaagcccgacgggatccactcaccaaacaaatttctgataaccaagtaagactcatcagatattttttggcagtattgttttgttggatatactttttttctattgttcactgtaattcttaacaataggaccctgccatgttttttcctaagttcttagagtgtctaatgaaatttatatgaagaatttgatctggaagatttttttcgaaaaatttctggaggcataacaagtaagaatatgcatgtctccgagatttatagctcactgactttttgcaagtgaaacacaccctcaaatcagcatctagaaagagaacactttcaagattccaggaaccctcttttgctcccttctgtactgtattagtctgttctcacattgctataaataactacctgagactgagtaatttatgaagaaaggagatttaattgactcacagttcatttgagggctactgtagtgaagcatgactgggaggtaccaggaaacttaaaatcatggtggaaggcaaaggggaagcaggcaccttctttacaaggcagcaagacagagagagatagaagggagaagtgccacacattttatttatttattggagacattgtctcactctgccgcccaggctggaatgcagtggcactatctcagctcattgcaacagccacctcttgggttccagcgattcttgcctcagccttccaagtagctgggatgacaggcgtgcaccaccatgcccagctaatttttgtattttctgtagagacggggttccgccatgttgcccaggcttgtctgcaattcctgagctcaagtaatctgctcactttggcctcccaagtgtcacacactgttaaaccatctgatcttgtgagaactcactatcacaagaacagcacaggggaaattcatccccatgatccagtcacctcccaccaggctcctccttcgattggacatgagatttgggtggggacacaaatccaaaccatattacttacttaccctgaaggttatttttattaataagtttttccaagactttcatttgaggactactatagtgaacaaatcagataagtaagtttagtttcctttaatgactttttaaccaaactgttttatcaatttcgtaatagcagacatcttttttgtcatcagttcagttatagagttgataatattgaacaactatggtatttttaaaagtgcttttaagattctctgtataaaattataaaatattcttgaattggaggttttagttgtgaggttatagtttggtataacatttatttgcccttcagctagcctaagatggaagtgtatatttgtgaagaatttaagaaagtatatgtagaaaacaatcgaaaatgtggaagtatgtttttattctccacaaatgcagactttacttggttacagttttaaaagcaagtggccagttatatgcatttctggatcattctgtgtgtttgtgatactgctgactgtttccaccaaatgactcccaagtaatagtgaagcccctggccccttaactagaggaatacaattaaaagtgatgtcagtgtttcagttatcatattagaacattattttttaatcagcagtgtgattcttttcttctgaaaccttaggctgatttaaaatcttcccaattgctacaaaaagcattatattaaaggtttcagttgtcatttagatttcatggtgagtaccttgatccagagactctcagaggctgaaaaactatgtcaaagaaccaatgccagtggacaaattcagcatcagtttggctattcaagcaaactctcagtaaaccttgcttggcagcttgatccattcaagtggttatctttgtaaacacaccttgtgatccaggggcaagagatggaagacgtccatgttgttgattcttcacgtttctccaggcatgtatgcaggaactgtctctgtattcagtcctttatgacgcatgtccgtgtaaggatcagagaggtacagcagaaggaatgaaaaagacaaatggtttgaggaaggaaaatatctcaaaaagaaaatgataataatcttgtaatattgtcatctatgtactcgatcactttcttggacatgtttcttttcacttctactaattttggtttaagcttacatataacaaaagggtttgcccccagtctgttttcatcctgtgatatctgtatctaaagcatgtcaaaatctgctgggagtaccattgttttgattatactaattactgagtgaccaagtctaacaaacagacctgcacttgcacctcagatactgcttcaagaactgggtcctggagatggtatcgtcatggcgttcgataacgtcctgcagaaactcctggaggaatatgggagtgatgacacaaggaatgtgaaagaaaccacagagtacttaaaaacatcatggatcaatctcaaacaaaggtaagtctaaggccctggcaggtaaatgtatattgtcaagttgagaatttgatggctttggctttctcgtggaaacctgccaaacatgtggctactacaagtacattttattattatgtatttttatactgtgatgttctgagttagtattatcatacttagtacagaatgtatgcttatacaatatgtttttgaatttttacaatggagttttttattttatttttttaaatcagcctaaaccttgccaatgattatgtgttctgattgtcttacgctctcagtattatctagaatacactttgtagtcttctgatggtaaggagtgcaggtgtttacagatgcatcagggtaatggtatccctaaaggtaattggaatagcgtgctatttgggtggggcatcctaagttgaggaccagacacacatggatccaacactagatccctgaaataatctatgtgcatttaggattttagttaatttactatcttttttcccattactttgtctagtcagagtatttggaacagcccaaaatagaatatgtgtttacaagagaattttctgtcacttgaatcacttgaacacctagaatttgagaaactataaacagtgattagcatctctttaagactgcatatttatattcatcattagtaaaaaaagatgtttacatcatgcatatagtactgggaatgcctgtgtctaggtgaaattacgcacatctttattaaaatgcaactgtcttaaaaccaatttggtatcaaaacacatctattttgacgtgaataaaatgggtattagagcactttatattcctgatatattcctgctaataaagtatggctaagcatttaataacattttgacatggatacgttttatacacttccagagtgttatttttagttacaatctctgaagctctgaaaactcaaagaagagggttatgatggcacaatgtgaggttgaatgtgttgttagatataccttggatactggagaaaataagactgggttagcaaagacaaaacttcacaagtggttaaagcagagtggctataatattggtctttctaacattttactacaacttttctcttttattataataggttatttggatttagtaaggatatcataactcaggcagggaagaaggtgaattaaaaacagctttaaccttaagagatagcattaggagatatacctaatgttaaatgtgagtcaatgggtgcagcacaccgacatggcacatgtatacatatgtaacaaacctgcacgttgtgcacatgtaccctaaaacttaaagtataataataataattaaaaaaaagaaaagacctacaatcagacaaagcaggttagagaatttctttatggccatctccaagacagaaaggtaggggaagactcctgccttcaggagagaaagaaggaggtgaaagggcaggagaaggtcacagagagagattgttttctgaggcctgcttctgagccctgaggcaccccaatattagaacaaaaggctataacaagtgttatgggagttatgttgcaggaactgtggatgaaaacatatacgtattacagtaagtacgatgaataaaaattatttgcataatatagctaacataaaaaaaagagatatagtccttaaatatgctctgtctttgtgtttccaaaaattccatgtataagagttaggactttgttttccttgtaaacttaacaaaaaatttatccgttaggaatgtgtggcctgctttatttagcacctccaattcttcttcttattttttttttttgcttttactttgtaaatattttaagacagcctacagcagtagttggattagatggaagaggcaattaaaaatgaattatattgcaaggtgatttttcgtttatcatagctaagacaattacaatgttccagtttctttgtagttacaagtggttgtccttattgtgttttctctctgcattttccggggggtggaaataagtaattatattaatatttagacatgatttagatatattgttatctataaaacagggaaaacagagcaaaactggctcataggatcccttcgtgaatgataactagggcttctatatgtaaagagagttttctcttttaaacccagtgaactttacaatttttaactattttaaatggacatctttgtagaatatataaatctttctttgccttcttaaagcttgtgaatgtatatttaacttttttctgaattcttggtagtattgttgcaaagatagaattaaggaactttaatggatacgagtgaccttagagttcttctgaaccagtgtttctcaacctttctttacattatcgcttccctaaggagcctgtgtagactcatcttcccatgaaattttaataccatgatatactgtgtactgtatggttgtgctttatacataaaaagaatacattttttcaccctccccctgaaaagaaataaccatttattacctgtgttgagaatacatggtctaatctaatattctcaggctcagagaagttaagtgacatgttcaaagtcatgcaacacagtcaggatgatatttttctatactaaatggtaatgctcttcatgctgtgagttctgaagaattggcagtaaatttattcaggctgctatactttgtgagatttggggctttgttttgtgcgtataaattttgagtgtcgtctcattgtcaggcactgtactgacctcttcacacacatcatttcatttaatcttcacaacaactgcaggagagaggtagcattttcatcagtcctatgttaatgaataaactgaagtacagagaagttaaggaattactcaagactacacagcttataatggcagagttgggattggaattcaagcttgactggcaagccaggctcttattgtctctaaaaacagtttcatttttgttctttgaatcagactgtcagccgttgctgacattcttggtgactgctttgtgtacccgcctctcagttctgtctgtaattccgcttactgattcttatctgtgttgagtttagaagccatatcagatgaaagatacggggccttttttatgcataatgtaatgcactccagtacgtggccatcacaccccgtctaatggctgctgagaggcctttttaccatggctgccctcttatcttccagcctgttctttatatacatcattgtcagccaaattctggaggggtgaagggttgttatatttgcacatggaatactgtgcagcataatgtgtgaagttcaatatcagctttcaaaggaaatgttttgtatgaattgcagttagcctaaataatttagctattcacaattataagtccacaatcccttatctacaatgccaaaatctaaaaacagctttgataacagaaatctttgaattaccatgcagctctttattaaagtctttatttattctggttagtatgaatagcctttttccttgctgcagaaatattaatgtgtttgattgcttccccagaccctgttcaggggtagtaattaatatagttactttcataatattagttttctaatgttcaaaaataatattacttctgaaacgcaactgaatcctgattttttggattctttgaaaagtaggcctgtctctaatgtttctaactaatctatatatcctgaccactactttttttacttatcactttttttccttccatctcttaatgctaattaacaaattttctagtgccagttgagatagtgattgttgaaatgtgtttatagcacagtcagtgtggatgcctgatttgggtctaaaatgctattttagctgtatatattttggcactccagggcaaaaataacattatatatatatatatatatatatatatatatatatatatatatatatatatatatacatacacacacacacgtatacacacctgtgtaacacacatgtatatatacatacacatatatgtgtgtgtttatacacacacatatacacacacatataactgtgtgtatagacgtgtttgcacatgcatgtatatacaggtatgtatatatatgcacactcatgtatatacacacatagttatctacactgaagtattgtaaaggaaatgagacagtataactgtgtgctataaatagtttcttagaaatcactaattactctgtgtttttctccttgtccttatcgcattttaccttgcctatgttaaggtatttctaggtttgtacaggcagaacagaaagcactgagtgtaaggtatatggggcaatccttggttaaaagcccatcttaggcacttgccttctgtgctaacctataggaagttatttcaactcaccgagtcaccatttccttgattctaaagtggagaacatgtctaatatgtggggttattgtgatatcaaaagttatgtgtaaaagttcttggtaggtagtatatgcttaagaaaaagatgcccaaagtgtcatcatatgctctttcatataatgtctttctgataagtccacttcctttagtcaaatgcacagtactttctggggttaaattagcagaaggttgagtcattatcagttgtttgtccatagtcatttctaactctttctactttaattaatgataaaatacttctttgtctgcttttctgagtgcagtatagatattctaaaattttattaacagatgaaatttcttaaaaaatgcagtttccttggtttgcagaattatcacagttgctgaatttaccttgcaattaagcattttctgccaaagcaaaagtccaaccatcctgggaagaaaagatacggaatttaaaaagacacaattatttatttaaaaaaatattttattttattttattttatgttccaggatacatgtgcaggacatgcaggtttatgacataggtaaatgtggtggtttgctgcatctatcaacccattacctaggtagtaagtccagcattcattagctatatatcctgatgctctcccttctcctgcccccttcctacaggccccagtgtgttgttcccctccctgggtccatgtgttctcattgttgagctcacatttataagtgagaacatgcggtgtttggttttctgttcctgcattagtttgcggtggataatggcttccagttccatccatgtcccagcaaaggacatgatctcattcctttttatggctgcataatattcctcggtatataggtaccacattttctttatccagtccatcattgataggtatttgggttgattccatgtcttagctattgtgaacagtgctgcaatgaacatacacatacatgtatctttataatagaatgatttatattcctgtgggtatatacccagaaatgggattggtgggtagaatggtagttctgttgttaggtctttgaggaatgccacactgtcttccacaatggttgaattaatttacattctcaccaacagcattaaagccttcctatttctccacagcctcaccagcatctgttgtttcttgactgtttaataattgccattctgactagcatgagatggtatcccattgcggttttgatctgcatttctctaatgctcagtagtgttgagctttttttcatatgtttggtcacataaatgtcctcttttgagaagtgtctgttcataagacacaattatttaatgtgggagcacaaatacagatttattcagtaagataactttattttcttcttttgaaatgctattatctttctcattaatatttattaattaataatggccagctagacatgtggaatgtatatagttttcaaaaggttatttaaatattgtgtatagtaaagactgattttgtaactattctgaaaacaggttaagtttcaaaaatttaattttgattgactttccaagtaattttgttgtatatttggaagcttctattatatctgttattactttttcagtaatgatgtttattgtccctatagattaataaaaatgaagcttttttcagcatttattctttgtccaatttggtcaattccttttaacagtgatcagtagaagatacttatattgggattgtttcataaggcctgatatcagccaggctcaaccttcaagctcttaaaaatgaatgctgtagcagctgtcattcccgaatgaatgggcttaggtgaaaagtacaggtagccttatcctcctagcatgcccaccaatatgaggttcagagatttgggtcagtcaacttgatttatcctctcggaagcttacttctttccctgaaaatcacctttatttttcaacttgttttgtttattttctttgctaggatttgatttttagttttcccttccaagctgggaataaagctggccaaaaagagaagggtaaaaattatagtcttctatattttcctcttctgttacgttgttttaatatttcaagtatcattttattactttttttaaaaaacaattgccaacaatgtctttgtgataaatgcctatgaatgttaatgttttcattttgtaaatatcaaactcaagcatgcggatattttctcagcacatttagctccatatcaaacaaactaaagagccaatgcccacagaaacaatgcccacagtctttgtttttgttttcatttgtttctttttccattaattgattaatcaaccagttaaacaagtatttatttagcttcctatttgccaagctctgtgaccagccctaaagattcaaccataaatacacctcattcctgctcccaggaagctgacattgcatagggggagcctgcaatgtacgtaagtggtaaataggaaaataatacataattataggaggttgttttggaggtaagagaaattaaagaggtgctatgtaagagagggacttaactgaggcaaatttagaaagcataacttggtggcatttgagctggttctgaaggttaagaaggaaccatctgaagaaaattacagagtgaacagcaaatataaaagtcatgaggcaggaaagagcacagcatgtggttgcaatataatgaatatgatggtaagagcttgagatgcggtaggagaggaaggcagaggccagatcatgctgagctttgtaagacatggggtattagtccgttttcatactgccataaagaactgcctgagactgggtaatttataaaggaaagagttttaactgacttatagttcagcatggcaggggagacctcaggaaacttacaatcatggcggaaggtgaaggggaagcaaggcaccttcttcacaaggtggcaggaagagaattgctgagtgaagggggaagagctccttataaaactatcagatcttgtgaaaactcactcattatcacgagaacaacatgggggaaaccatccccattatccaattatgtccacctggtctctcccttgacacatggggatataggggttataattcaaggtgagatttgggtgtggatacaaaacctaatcatatcacatgggaaggagtttggatattaaaagtacaatagaaagctattggaattgttaaggaagggagtgacactgtctaatgtgtatatatattaaaatttaatctctctggatcttatgtggataataggttgctagtgggtatagtagaataattgcgaagatcagaaaggaagtgatggttgtggtccaactgggacatggtggtccccgtggctactgtatgccagcaatgatggaaataagatgttagatttgcgatatgccttggaagtagaaaagacattttggtggattagatatatgccttaagggcttggaaacaatccaagatggtattttgtaaaaggatgagtggtggtaccattcaccgaattgggaaaggatgtgggagttttggaagaacaaaaattgcaagttggattttgttaagtttgagatgcctgttagatatctaagtatataggttaaataggcaattatgtatgttaatctggaactcagatgttctggacctcagatatgaattgagagttctcagcattcacattggaggttgaacatgtgggactggatgagatcaccagggaaggagtgaagatgaagaagagaggggtatgcttaactgagtccataaggcctagggtttggtgattgaacaaaaaaggaggaaggagcaaaagggactcagaaaaaatttccaatgaagtgaaaaaacgcagatttgtcatgttcagaaatagagggaggagaatatctcttagaggaaatggagagaggagaatgtttctaagaaagaatgatctactggattgaattgggctgaataaccaaataggatgacacagcacactattttggtaattccacagcttggacattcctggtgattttggaaagagcaatttggaggaagtaatgtggctggaagctagagagtgagatgaaggtgaagaagtagaaacagtttgtggaaacaactttagagaagtttgtgtgaagagggacagagattttaggtagtgcttagtgtgggggctgtaaggttaagagagtcgattgacttttctgttaaaatggattatagtaaagcatgtttgtgtgcctatgagaatgacccactagatgagagactgatgattaaatgcagaggggacaaaggaaggaggacaggaaggctttgagaagataagaaagtgagatttagagaattgggtttggtaagaactggaatgcatttttcattatgaccagaaaagtcaacgagaaggtgagtttagatgtacgtgaactagaccattagtggtggaagatgaaaggttctccatgcaagaactgagctttatgatctatcgagcacattgtcagtgaagttggaggtaggactaagagaagttggaagagagaggattgggtgtaagttcagatctttgtgagtgggatggagagtttcctagggtaaatatatggtattgctgggcagtaatgagtgcctatttgtggtttatattattaaatgtaaggaaaggtagccctgttgaactactctttaatagcattcatctactcaatgaggcaatgaagaagaatgcagatggaagtgggagaaagatggagcagggaagagtaagatctttggaaatgagaggagaacaggattgcctgtggtccataatagtgtctaatgtgtccctttctctgggtggtgtcattcctcactagagctatggcttggcaaacagaccttaagttggatttcaaacttcacttcctcattgaggcagtggtcaacctctatatacagtgcccctgaacctgaagctcagtataggaacagagtggatacatgtgttgtgctttctacagtgggattttgcctggaagatgggtgaacaataacctggaggtagcagtggggagcagggaggacccttattccagcttctcaaactgaggcataaaggatctgagagaaaaaggaaaagacttcatgaaaagtttgcagggaaccccatgcagtagctcatgtctgtaatccagcactttgggaggctgaggcaggtgaatcgcttgagtccaggagttccagactagcctgggaaatatggcaaaacctcatctctacaaaaaatacaaaaatcagctgggtgtggtgacacatgcctgtggtcccagctactagggaggctgaggtggtaggttcgattgagcctaggaggtggagattgcagtgagctgtgatcacaccactgcactccagccttggcgacagaaccagactctggaaaaaacaaaaagtttgcaggagaaataatggccctatggaaactggtttcagtgaagacaaaaagggattggcctggggagatggaaggtacagcagagtctgctgatcctagaagaggagctctagagcatggtggaagaagggttggggagtgtgttggagcagactggggaaggtattggagttatgattcaatattggttgactaatgaagaccaaatatctggtagtgacttagctaaaggggaaataggatgtggtgagggaaatcctctcaaagaaatggctctgtggtcttgactatttatttcctgacaatcacagccccaagagagatgctcctttgggttcacaaggctgtgggcagggatcatggggtagcagcaggggattgtgaaatgaagactgactcttctttcaactgcatttttccccacagcatgctttaatgtatttcccaggtgaatattatttaaaagaacaaaattaccttgtgaaggtgctcactgaaaagtttaaggtattgtttcattgtaagttttctacctgccactcaaactactgatgctgctgtttttcattctaaaagagataaatgtatttaaatattatattaatgtaaaggtcaccttttgagcacaccaaaatttggcaacacacattgatgggtttcctgagatgctcttttcattaaactctttaaaaagagagacatatctattcatgttcaaatactcttttgaccaattataagtaaatgcacaattgattaaataatatatcttgtagcttaaaatatcaagtattatttaacatctttaaaataacattttaaaaaggcaagtatgtcatgttttattgtgttacaaaatgattataggctatagggtgtcatagctgcttttattacaaaaatatcttttaaaagctaagcgtttacatttaaaaaaaatcctacttccctttactgtaaagtgttataaatctgtcacccgtggatgtccttaaatcttttttgggaagctatttatatttttacttggtgtcatttcttgcagtaaagacttttatagtctgttgcttcttctgtttgaagtaaaaaaaaaaattatttctgctaatgttacccttctaaacttaaaatgttgtatctttaggtttttagtctgtgttctttgtgatttgtagatttaacaaaagatttagaaaaaaatttctttgcctttgtcttctagccacaaattcctaagcttaaaatcatttcttttcctgtaacagcattccttcccttgtattatctcgttatttttctcaatacgtcctctagctgtgttctgatctttcttgagacgtagcagtcagaactgccaaatatgaaatctacattgagaatcatagacgaatgcaagttcagtgctggatgcgatcttagaactcttccacattaatgcttcccaaccttttttgcgatcggcacactactcatctattcccgccagtcatctttcgtttacatgcagcaattcttaatgaagctgaatttgaaactagggatggaggtgagagtggaggaacacttctagtaggttttgtgattcctgtgatggattatgtagttttaaaaggatctctggagattttgaaatgggtaatttactgatccagtacaagccccttattttaaggatgaaaaaaataaattggagatttgaaatgatttaccccaagccatacagctagtaaatggtggaggtgatagaattaggtcattgtcttttgagagcagtgtacacaaatggcattaaaggtggtatattcacctgtgtaataaagtatgaatacgtgttcctgagactctaatttcagtgattttattgacttatgatattatgataaatcatgtggagttccttgagaatggataaaaaatcttgtaatattgagtataccatactctagcctagggtctaatttttaaaagtaagaaaaaataaactggaggtggaggaaacaactaagctatagtctattagaaattttatataaattatattaatttcaaaaatcagaatataaaataacatgtataagctatgattttaaacttaaacacatacattcattataataatatgaagacaatttgcactgctataagtagggtttgacttttagtatagtcattatgtttagtagttaagtttatgataaaaatttgataccagctatatatgcattaaaaaaaaattccaggacacttatcattaaatttcacatttgcatgcaataagcaaaattaattgcctagtatttcaccaaattcatacatgaggttagggaaaatatttactgagtattcactatatcttgatacatttatatgtgtatatctcatttcctccttcaaatattgctgcaatatggagatgttattcctattgctgtataagtttattcaataaatacttgttgagtttctactgtatgtaggtcctggtcctattgggtgcactgatgagcaacagctttaaacaggcaagaaaacaattgcttactgtcatgatcagagatacaatgaggaaggcagaaaagtgtcccccaaagtgattattctggattttctgggtgagccccatttcatcccaggagtccttaaaggtggaggaggtggcagaagagtggttcagagagatgtgatttgacgactttacctgctgttgctggatttgaaggtggaagaagtggctatgagtcaagcaatgtggcaacctctagaagttggaaaagaagaggaaccagattcacccctagaccctccagaaataaatgcagccctgctgataacttgattttagtctagtggagacccgtgttgatcactgacaaaactgtaagataataaacttgtgttgttttttaccacaaagtttgtggttatttatgatagcagcaatgaaacaccaatagccatggtaggggaaactatgggatgccttggggaaggtaccatggttttggaaagtgtttgcacccaggtctggatggtcagtagaagttaactaggtgggatggagaaaattagtggaggctggaggaaaggagcaggaggatatttaaggtaaaaaaaagtaaaatgtagaggtctggatgcgacagaggcagtgaccactcagaggattaataattggttcatttttatagataaataacatatgaagtgtgaagtggggagatgcctcctggggaggtgagccagagtcagatgatggaaaacctgtgtatcaggcaaagtttagggatgatgaagacaatccttgcccaagcgctcatggctagtgagcaatggagctttgtctaccttaatccaaaatccatatttttttacttatataaccaacaaagtagacatctcttacaaaacaactaaaatttgtttttctgaaagtttcatacaaagtgaatattttttaaagtagtatctcttttctcactgatgatcagtagataatttgtcaatgggtggtctagcttctggattgagaatgttccactggtcaccaaagtgtgctgctgaagttactttacccagtggaatactgtctgaggccaagtgctcatggtcccttagctcacttttcctttgaagtatgaccgtaggttgtctacctcccctcgtagccttgtcctttatacttgctaggtatttaaatatctgtcatataagaagaatcatctgcctttacacttaggtttcttggacatttgcatccttttccctagtttggacattctcagggtttaatagaattaatctgtaatgatctctttttacattagctgttgccatataacctattatgtgcatatgaatattcttaaataataaaaaagaattctgattatgggaaatgaaggtgtttgaccttactaaattttttaatgactaaattttatatattgaatgttcttaaaggagaatcacctgtgtgtagtggattgattgcatatgtgcactcctttaatctttgttttctagtgcctttttagcacagccttcatttggctattcttaatgttttttctgttgatgttttaaaaatggaaaatatgggcagggtttggggaaggataaaacaccaccaacaacaactactcaaattctagtgggtaacttctaaattttaaaaattaaaattcacctatgattacaaaaaaaccaacaaccactaagcactgaaaggtttataacagaatatagttcttttccctcgactcactgcagtccccttcctagaggcaactattctccttaccttcttctatcatttttacatttccatattctaaataaaatgggtatgccatcatctttcaattctttagtattagaaattgtctgctgatatcctattttggtaaatacataggaagttgcttagggatgctactgttcttttccctgcttcgccattgaattttaggtaaatacatatacagtgttgacattattttgcttgtccaaacattattaccagctaaaaactgaggtttactgtaattttgtttcctatgtgtttgttttacctgaaattaataattgccttatttttatatgcctagttttctttgcacctattgctaatccctcccacattttccagtgacctgacagtacaattttccacaaagccagtcacattcagcaggctatcacttctaatattgttccttggtccttggtgacctctcttctggagacatgctttctaggcctgctgcacagccatcatgctgggtatttgctttgctcctagtttagaatccctgttgcttggatctcatggaagttttgtgttattcgtttgtttttgccttttttgtttgtttgttttggtttggtttatttgttttcttcttggggcgatttcctcattttgtctgagtgtatcctttgtaagttttgtcacgttaaaacaggaatacagagtggtggcaacgctgaagacagcccatacctgctccagtttggattcagaccctcttttctgtgatctcctctcaccattaacaggagagcccctttgcttcttcctgggctggatctcttttttatgcttctcatatcttcctccttcttgatttgcaaactgagttctgtgggggatatctaggagcttcttgaaaaatggtatgtaggagttattttttataattagctcaattattatttttagtttttttaaaaaaatttttactttaagttctgggatacatgtgcagaatgtgcaggtttgttacataggtatacatgtgcgtggtggtttgctgcacctatcaacctgtcatctaggttttaagccccgcatgcattaggcatttgtcctaatgctctcccttcccttgccccccaccccctgacaggccccggtgtgtgatgtttccctccctgtgtccatgtgttctcattgttcaactcccacttataagtgagaacatgcagtgtttggttttatgttcctgtgttagtttgctgagaatgatggtttccagcttcatccatgtccctgcaaaggacatgaactcattcttttttatggctgcatagtattccatgttgtatatgtgccacattttctttatccagtctatcattgatgggcatttgggttggttcccagtctttgctattgtaaatagtgctacagtaaacatacatgtgcatgtgtctttatagtagaatgatttataatcttttgcatatatacccagtaatgggattgctgggtcaaatggtatttctggttctagatccttgaggaatcaccacactgtcttcacaatagttgaactaatttacactcccaccaacagtgtaaaagcattcctatttctccacatcctctccagcatctgttttatcccgactttttagtaattgccattctaactggtgtgagatggtatctcattgtggttttgagctttttttcatctgtttgttggccgcataaatgtcttcctttgagaaatgtctgttgatatccttcgcctactttttgatttggtagtttgattttttcttgtaaattgtttaaccgtaggagctaattttaaagacatagcatggccgggcacagtggctcagcctgtaatgccagtacttttggaggctgaggcaggcagatcacttgaagttgggagttcaagaccagcctggccaacatggtgaaaccctatctctactaaaaaaaaaaaatacaaaaatttgctgggtgtggtggcacatccctgtagttccagcactttgggaggccgaggcgggccgatcacctgaggtcaagagtttgagaccagcctagtcaacatggtgaaatcctgtctctattaaaaaaatacaaaaattagccaggtgtagtggcaggcgccaataatcccaactacttgggaggctgaggcaggagaattacttgaacttgggaggtagaggttacagtgagctgagatcacaccactgcactccagccttggtgacagagcaagactccatctctagaataaaataaaataaaataaaataaaggaatattatggaaagattgtcatttggtaaatacttgtataaataggactcaggaatatgaaggtataaaaagttctgctgaaatgcagtttatagaatgggtggaaagatacgaaaactatataatgtagttaaaatacaatttaagaatgaaacaagatcatcattcaaggcctttttccaggattcatgtgattaatcattgtttgaagaggattattgaccttttacgaactcataacaaggatactgaactgggatggaatattctggaagaggtagtccttaacccttaaaggagtcgtaggattgtggtaggattgtgataaatggagagggtcagcaagacatttttatgtggatataacattttcgtgtggacacaatattaagaatattctagagaaaaaggagcacaccactattacctaaacagagtattgaagaaaactaggggataaagtttgagaagtaaactgggatcaattatggaggaaattaaattccaggcgaggaaatttgaactgattctgcaggttaagaagtaagtgctaggatgaggttgatgacattcaagaatgtcatataaacagaatgttagtatgtagtctttagtgtctggtttctttgacttagcagaatgcatgtgagattccatgcatgttgttgcatgtatcagtagtttgcttatatttattgtggaatagtattccattgtatccctgtaccaaactttctttatccgtatgtaataccagttggtatttgggttgtattcagtttttggccattaccaataaggctgctatatacactggcatacagattttatgtagacatatggtggttttttttgttgttgtttgtttgtttttgagacagtttcactctgtcacccagactggggtgcagtggcacaatcttggctcactgcaacctctgcctcctgaattcaagcaattcttactgcctcagcctcctgagtagctgggattacaggcatgccccaccatgcccagctaatttttgtatttttagtggagaaggaatttcactatgttgtccaggctggtcctgaactcctgacctcaagtaatctgcctgccttggcctcccaaagtgctgagactacaggcatgagccactgtgccccacctagacatatgtttttgtttctcttggataaatatctaggggtaagattgctgagttgtatcactaatgcatggttaactttacaaaaaactgccagctgtttttcaaaatggctgtacttttacctgcaatgtatgagagttgcagttactccacattcctgccaacccttggtatagtcattttcttaaagccgttttaacatgaagtaatgtctcattgtggtttgaatttacatttctctaatgattaatgtgctgagcatattttcatttgtttatttgtcatctaaacatcttctatggtaacgtataggtttaaatcttttgcccattttttaaaatgatatgttaaaaaaagatactgcatcattataaaataaaaaaaatgccaaaaagtacaaataggaaagtaaaccaacttaaatcccagcacccaaaaataactgtttgaatattaagttaatattccagacatttctccctctatgtatatatacagatagaaggacggatggatggatgaatggatggacagagagaaaaaatacgtgtaaataaagtctattagatatgctgatttttactgtgatacaatttgtatacagtagtccccccttatctgtggttttgcttgctgtggtttcagttacctgtggtatatacaaaaagaaatcttgagaaagagagagatcacattgacggaagttttacacagtatattgttatgattgttctattttattattagttattatcatcaatgtcttactgtgcctaatttatattgtaaaaataggtatgatgcatgggaaaaaacatggtatatataaggtttggcactatctggggtttcagacattcactggggatgttgaaatgtatcccctacagatcaggagggactgctgtatcacaaaattcatcaggatttttagtatattcaccatgttgggcaaccatcactactcttaatttcagaaaatttatcatcctccaaagaaaccccataccattagtagtcagcctccattgtcctccaccatgcaatcctaggcaacacctaatctactttctctatatatatgaatttacctattttggaaattttgtataaatggaatttcaccatatctggccctttgtgtttaacttctttcacttaacatagtgttttcaaagttcatccatattgtaacacgtgtcagtacttcattcctttttatgggtgaataatagtctatgtataaatatagtgtattttgtttattaatttctgtctcaatttaggttgattctactagttggccattatagataatgctgctacaaacatttgtgtacaagtttttctgtggaaatatttccagttctcttggatttaaatacctaggagtgaaattatcgatactaatttttaaaattgagttgttttcttattatagagctctgaagaatataaagttttaaatgttgaatttacaggtgtgtgtatctcttaactcatataactccaagatagctctgtgttctaattttgatgtagatttaatgaagggtttatagaagctcatttgtccaatgcattctaaatattactaaataagaaaccaacttgtatatatatgaattgtttaaaatatataaaatcagctgcttcaattatttttattttgtcttaaatatttcttcagatattatttcttcctagaattcatttagccactgactgtaggagtatttgttgatactgtctttatgtaagtcaacacaaaaggtaattgtattgacttacataaaggcagtatcaacaaatattcgtatagtcgctgactgtatgaatatttaatccttaaaggagtggtaggattcagtgactgaatgaatagaattgccttttgtattgacctacaacatatgggggaataatttaacttacaattatgagctgtaaaatgtagttataattattttatgatatggatgtgattttaatatttttatggctctccccctttcactcttctcagaattcacatgatccctccactaaggattattcaagacacacatacagataaatctcccagttacctatggtgacttgaataaaaggtcctttgggggctgcctgttagttttttatttaggggatgcgtgatgtggaatgtcacaacactgtaagtaatggagccgtgctgtcatattgttactttcagtattgctgacagacagaacgccttggaggctgagtggaggacggtgcaggcctctcgcagagatctggaaaacttcctgaagtggatccaagaagcagagaccacagtgaatgtgcttgtggatgcctctcatcgggagaatgctcttcaggatagtatcttggccagggaactcaaacagcagatgcaggtaagtgcatgggaaaccacaccagtacctgtgtttgccctgtgtgcttttgatccctctgcatgcaaatgtgttacccttaaaaggtgaagttgtcactttattctcttatgaaatccgtgctctcctgtgaataataggtttcttgaaataagctctattagatatttttacttaatgttagaggggaaaaaacccaccttgttttatggaagtaataattgtttatttagagttagaggctcacagctattctgctttttgtcattttaagccctattatggttagctttattgaatcctaaattataagggcattttcccttaatgtgaagttgtttctttctccatttattatacatacttaatataaaagctgcaaaagctctatggcttagtttataactaagaatattaggcttgatgatattacttttatgtcattagcttgataactgtgattgtatatgtagtctgaggttcaaatatttcttctacacaaaatgtgctaatataaaacttttcatttataaacattataaggaatcttatgaaatacgtctgaatctttttttgccctcaagtagttctgcttcagtactcttgaaccttccagttcaaaatctgattcatgcggagtgtggtgcctcacgcctgtaatcccagcactttgggaggccaaggtgcgtaggtcacctgaggtcaggagtttgagaccagcctggccaacatggtgaaaccccatctctactaaaaatacaaaaattagtcgggcgtggtggtgcgcacctgtagtcccagctacttgggaggctgaagcatgagaattacttgaacccaggaggtggaggttgcagtcagccaagatcgcactactacacttcattctaggtggcagaacgagactctgtccactcccaaagaaacaaaacaaaaacctatttcaatggggaagtctccttgtcaaccatagtattacatctgattactttataccatgccatgctcacatcagtttgacaactattatttctgatgtacctgtgaacacgtgttccattgtcttttgttgttgttgttttgttgcccaggctggagtgtagtggtgcaatctcagcttgctacaacctctgcctcctgggttcaagtgattctcatccctcagccacctgagtagctgggattacaggtgtgctccaccatgcctggctagtttttgtatttttagtagagatggggtttcaccatgttggccaggctggtctcaaactcttgactttaagtgatccacctgcctcggtctcccgaagtgctgggattacaggcctgagccaccgtgcctggcctccattgtcttttgatacatgtctctgcttgtcccagttggtcacatggttcttcaagggcagagattatattatctgtattgttgcctacgcagtgccctgtgtgcaaatcctaagtgaatactgactgctgtccttggaccttgactcaccgttatgaaactcagcattgaaaccttttttaaatccgttcttaggaactcttttctctgaaaacatgaaaaagaccattttgtaaaatgtcaacaaatgtgtggatctggatgaaggatacagagtctttctttgaactactctgattcttacaattgttctttaagtttgaaattattttcactgaaaagttacacaatttgaaaaacagatctttttggaatgagcttatttataaattgtccctgtgcatgaaaactcatggtgttttactgttgagttcttaagattcatttgttgaaaatttctgtttaaatacattgctgcttctatcttattcattgcgcaatacattttgtgacttggtaatgagtgtgaccaggcaagtatcaaaattaaatctgttcctttgactcactcttttgagcctcatgaggtcactataaatgttaattgataaaatatttagccatcatctgtattttaggaggtcatagaggactctaagtgtggatagatgctagattatttatttttttatgatttaaacaagaaaaagcctgacctataaatgctcacagttagttaacttatgcaatggtttaatttcagtagctatctaggctgtgcacttgagtaggtaacagtttatacacaatgaataaaggaggctttaaatgaaccctggtaatgagcaccagcaaaacacaggcctattctagagtttaatgatgtcttctgacatattttatcttaggatatattcttaccatagctaagactcttctcaatatttaatgaatattcaaacagtggaagacaaatgtaaatagaaatgtttaaaatctttcaaaataaaaatatctaagcacaggattacttatggcaaacagcatcaagaaagggtgctgataaaaatattaaaatacattataatgctttataaaatataatacattattactttagtgttgctaaaaatagtctcttttggctggtagaaagtaataaagaggacatttactaagagtccactaaaattcctttgtttaaagataaatatgtacatttatgtttagaatgtttcacattacggtaattcgcatgatttttcactcccttgctttgttattaaatgctcttaattttaaagtgttctctccattctatttttaaaaaagttccatggttttattttcagcaccttatagatagaagattgttagagatttagtaccttttactgagtttttctgaggcaagagaattttaatttttttatggtgttgtatattaatgattctccttttgtatgagtaaacagacatttaaaatagaaacttgtttggaaatggagagacgtttgttggagaaaatgactgtacagaagcatggcaaatcataacagaaaagttctggtggcatggtggtggcagtggtggtggtggtgctggtggtgcacagtctttgtgcactaaggaagatggaataaggagctccgtgtatctttgctgcatgcacaggatgtgtatgtagaactacttagctgacacattcgctgtttatacttgcttcatgtcttatgacaaccagatccaaggccatgggagtatttcaggaagataaagcagtttattctatgctcagtttaaggtgaatcttgggtgaattttgataaggataggtctaaagcacatggaagatgattaacttttgggagtatgctatgatacatgccattcttttaaggatggatgatgatttggatttatgtatctatgtttcattgccctgctgcaaggctgttaggatttattccccagcagaagccttttggcaagagaaaagccgattctttggagccctgcaggagagacaagctccttgagaactgagcagtccagctcatagagggtcttaaatgccatgcaagtatttatattttaatccagtggcaatgaagagaagtcataaaggatagtaacaagagtgatgcaatgggatttttgctttataggaatttagctgatggtatgaggaatggacttgaactagacaagagtgacagaagagaggcctgttaggatactcatgtagccatccaggctacaggtaataattaccagaaaggagacaatggcaggggtagtagatctaatgactcaatagtatacatagactgaggaaggggaaaggcagattgccaagtggtgttagagcctaagactgggaacatagaagaaaatgtcagagcagggttgcaagttagcgggaaatgtgtggggatggcaaatttcatctgttttgactttgttgaaatgaagcattggagtaacatccaggaggaattgcctggtatgcagttgtcactgtgaatctatattcagataagagtatttggccaaagatgcagaaactttattttttgcttttgtatgaaagcccattattgacttccaactagtttattagttcaagtgcatttattcttaatgtgcatgttcatattctaaaagattgttattcttttaattatatttaaaaatttcagctttacatttggcattaccaattaattgaaatgctctgattctttgctgggtaaaatcctgagttctgctgcctttctggagtggtgttgtcatgggtggctggttttgctctctaataatttacgttttaggattattacacttttatctcctatgtttgcttttagcctcattttcatcgtcttgttccatagatgcagactttgattatagattgttttagattttctcctgtgcccagctgcatgcttagcactgtgtttgaggggtgaatgcctatctcatggggacttcatctgctggttctaggacaggaattatagcttcatacttatttaataacaactttcttggcatataattcacatactgtacagttcattcatttaaattttacaattcatttgtttctagtctattcacgattgtacgaccatcaccacaatcaagttagaacattttcattacctcagaaagaaaccccttccctttactagcaatttcccattcctccccgccaattccctcccctctgaacaatcactaatctatttctatctatttgccaaataccttaacattttatactctatcctttgaatatgttctccacttttggctttacacagatatggtgacattgttagcctcaccagagggaggcagtgtagattctcagtatggacctgcagggaaaaaagatacaggcagaagtccacagaacactgcctgatgaacacagttctataagacccaataaagtcggcaaagcactgcttgataaacaccgttctgtaagacacaatataggactttaaatcgttgtaacatgaaggactaagaaaggcaaatgaagtaaaggaggaaaaacaaatacttgaaaatactgcatttcttttaaagaatcatgacaacattagacagaggtgaaattgcagcattagcccggttaccagtttgagcaggacactgataatgagcaacatctgggttctatttctggctgtgctctttgacccagtcatttaatcatccagggttattttgcacatctcctgatagtactttaccccagttgatatttgcaatgatgttcaggctgcagtagagaatatgtctcaagtgtgtgtatatatatacacatagaaccccaaaattatgtactggatttttatatgatataattatggcctcatatttcctattcataaaattaaaacagctttatggcaaatacaatgagatcatgaagatgctgtctaaggggaaatgtggcaatttggaatgttcagtagtcaattacagacttttaattttttattcacttagctgtttaattagacaaatcctaacctattccatttctaatggctttccttctaggcaggcagatgagaatccactggatcgctctgcttttagggtgtcttagtcatataacccctgcaagtattttttgttttgctttatttttgttgttttgttttgttttaggtgattttgggctgagatctgtctgggggtgattttttagcacttaatgtatgggctgttgtcatcagagtcaggtgtacccttctgctcttctcaagatttataacagggtctcctgttcactaattcacagagcacagctagagctgcatttattgggtagtgaacatatccctctttagagacggtgaatgctctgttctctcttaatagaaaccagctacagggcatgcaccgtggtggtggcagtgatatgttgaatccctgttcccaggggatgtccgctttctatctgcagctttaatgtttcacttaatatcctctttggctactgagcgcactcctctcccgcagccggcagcgcttggctgctcgacaacttccttcatttctggccatgccgggctgagcaagtgctgcctgtgagcatctgctggggggctttctctgtggcgtttgtctgtgttttttaaattgagaagttgaaggaataccagcctcctttttcctagaacctaaccccctgtatctttcaaatgctttcctggaaacgagcatgctcagagaactgacaaatcattgtccagtgaccgggaggaaatgatcgttgctcttcatttataatgcaaattctgaggtgtctccagaagtgtggtaaacttaaaatgatggctgtggtgagaacgtctctgcagaaagttgtggttttgttgcatcgcttacaaaggatggcagtttcttctcctcggtatcagaagctctgtaaggtaactgagtgattgaaaataaggatctcgggtgtctgacagttctactgtttctcaggctctaaaaactaatctttcaggttcttatcaaggaaagattccctttcttagtaactgattgtgaaagctgttaaagtgaattgcataattacattttgtttaaaaatctaaaacaggttttagttttagtacatagtttcttttgcaattgacacaatcttgtcttctgagatgggctagtgaaatgtttggagaaaatatgatgcaaaactactacattcattaagacctgttacctctctggtactttgcagtatcttaatagtgaatggcacattaatcttatgtaaattttagtaaaattaaaagaagagtgccaaataatctttcagtagatttttaaaaaatgttccattgttttatagctaattgctttttcaattaaaacaattaaaagacattttaaaaaaatgatcagactgaatttcatcataaaacatcccctatattcttaaatctccatatattatagttacacttgaagaatttaatttcacttggatggatgaattaagtagacttactggagacaacttgtttgacagttgcaaatttctaatactacgtcatcccgaacataaaccattcaatcagctgctgtatttttttaagtcagctgttatatgtttgatcatagttttgttttattcaaactatgttgatactatgtcattacttttgtcaaaattagagtgttttgatataaaaggagagagttataatagcaatttttacactaccgcagtactatattcctccttcctatcatatttttagtaccgttctcaagaatgtatcttgttgctctgttagctgcccaaactcatttgtgatcaaaacaactgcctctaagaaaatattatttttctgatgatatacagtatggcatgtccaggcatctagatgatgcttatatggcagcagattgaggtgggaagcagtattccattaactttattatatcacactgtaatttcttacaatttggccaattagatatattgctgtctggaaactttttttttttccggaagttttgggagacagattcaggtagtggggtattcttttcagaaatacttacaagagttttatttgcataagaagttaattaaaacttaatggagcttaattaattcagttacaaagatttgtaaacctagttatttcaatgtgttgtgttttgctctacttcagtggataagtttattctggtaaaacatttatgtttttcatgaaaaggcaattttgataatagataagaaaagctcattcactaattcatgctatttaatttttttaactaccagtatgaatgtataaagctttcttttttttaagagcagggtcattttcctgatccgtttgtgtgtgtactttcacaaaaccaaatatttttctaaagtcgaaggtattaagttagtgcaaaagatgaaacagcagaagtcaagtattggagaaagttgctaattagtttgctaattctaccgcaaataggcacaagttaagtcactgaagtcattggataaattaccatcagaagtgctttttgggaagacttcttgatttataatttcctaaagataccatgaaaatttaaatgtttagaataaatgttacttatttcatttagagaattaaaatttacattatttgctgttgaaatactatcttccacgtattctttcccatatgcaaaattaacaactgcctgattaacgcaatgagaaatgtacaattccagtacattgcagcaggtgtcagtataaggcagtgacataggagattttgcctaaagaactggaaatccagattaggaagcggcacaattactatgaaataaataaactagtaacagataaattttatttgtgtggttatattttgaaaactgatctaagttattgagctatattaatgtaatgaaatgaaaatttagttgtagacttaaatattaacagttgccatctcaaatattgatagaggtagctataccaaccaaaaatacttaattgtattttaattatcaatagtccatgtgtcatacctaaaagtttaaatgggtttgacatttatttgctttaagacactgtaaattcccttcccattaaattgtaaatgctgtcttgactttctccttattcctcccacattctctaaatttagtttcttagaaaaaaatgctttaagtttgtgtatctccataaaaatacagaaacagtctattgtaaatacatgtagagaccaaaatgaatgagaataaaatgtggcataatctgagggaaatttgactatttaaaattcatattggcattttgaaattcagtgtctgaatatttttatcttcttttaaattcctcttgaggatcattctttttatgtattatttgtttagtcttttgttagacttttccctctgtggcagctcgtcttttctgcttattttcatacttctcttgtttgtcagaagatagtgtgtgtgttacacgagtagatacttgtgtagaatattctcattttgtgggttttcttgtatgtttcaaagagaagggaggaatgaaaaaaggcatgtcacagctctcagagttaaaatatactcccctcccacaatctatttacacattcacgtgtattttttgcctttaaaaatatttcttctcggttatacatccaataaaatttgagcaggaagcaaaaacgtaagtgctgcttacttggagatataattagcagcattgaaattgccctgatgacctaaaatcaccctacactggatgctaattttctcagatatggttttgtttgcttagtttctttaaaattttcatgcctataaaataatttttcttttagtagagcacagtagaaaaaaagctgatgtaaatgatttgaaaaataatattgaatttaatttgtttttattgttacgtgattactttggggtgttttatatcatgaagtctttagattagaactgggttatttgtgttaatgttaaatcagaagagatttttgtaagtcctccttatttttttcttagtgccaatttctgtaaaatatttagcaattgagggcatggtaaaaagcagtttcctgtaaagtagattgggatatgaacattatagaaaaatgagaaaaatttaaaaatatttagtgctgtaaattgactccttcgtgactcaagcattttagaaaatgttgatttaagtgatataacttctatttgcttgaatgtatatgtaaatcattttagtttaagtggttttagtcaccccccaaactattctgatcatatttcttcagcaaaaatcttttaaacatctagctgtatatagatgtgtattcatttaaaaattatacatatatgccatggtgaaatcatgtattaaatattagtagtgtataattttgttcttactttctactgttgcctttttgtaccacagttgattctttttctctatgtggtatacacaacacgattttggtgactagtcatttacatacagagtgaaactatggctattcttagcctggccttctagggggcttgagctttcagtgtggtgctgatctcaaagtcttccccggaatactgtgtcttctgtggtattaaagcaactacttctgaatattctgtgaaaaatagaagagaccagaagattccacctgggaagtcacgattgaccagtgatgtctacaaaaggcttgctttgtggctgtgtgtgtgtgttttcatgtgtggacgtggacaacacagaactatgtagttgcttgtagtgctaatgagtaaatagataatgaacatgaaggcacattaatctctcagcaggtttttatgttcactgatgaagtaaggtcacatattatttttcatctacatgtacagctccctgtatttagaggtagttaaggttgagtatgtggttttttagaagacactgaatggagtggtgtattttcgaccggttgaattttgtattttttactctcaaacatttccccacctttttttcacaggagaaccctgctctccttggacaattaaatcctgaagtgatccagggcaatggagatttactttaacatgatctgattgttgagatgtgtgtattttaaggtcaactcttggattccctcagtttctctcaataaccaactcatacatagattgtttgaaccatggagctcagagtcatgaccctctagtctgcaagttagaattcccacttgatcatatgagttgtctcttcttggcttcatgagaaagtcttggttagattagtacagaaactgtgtgaaggttgaggtttaatggagaaaaatggcgtatgtagatgggtttgcctccatctaaccctctctatggatgctgtaggtgtgtttcctgggagctgtatggatacccacacagactactttctctactctgcgtttgtttctgcacttcctagtcaggtcaagattacagacaaaagtgagacgggatcaaggagaaaacacctgcacccctgcctgccactatcagacatgattcctgtggcttccaagagcacaagtgccattttagaaagctcttggacctctgttttgctgtagttccccaagttgatatgtgttgtcaaaattatgtttttaaaaagttatccaattaactaacattttcttaatcagaaaactcatgctatcaatgacttggataaagtcaatataattagctaaaaacagtataattagatctgatgcaatgctttgtcactcacttaaagaataactaatacattctataaggtagcattttaaaattcttttatagccaagatatcattatcattggtgtatgtctagaagtgtaatactagtacaaatccggaacaaatagaaggtccttctgagatggagttgaagtagtattaaggatacggataaaaggtctcttttatttgtagagtattatttgataattgtaacttaaagggttgatgatttgtgttttcctagaggcaaagtttattaaatttcaagtggaaatttcctagctgtaggtactgctagattttaaatgtgcagacatagctccttcctcttactcttaactgtgatcactaccaacttctcttagtatatttggtagtttatttttagttctctaaaataagtaattagtagagttcctaccatagagataaaagaatgtagaaaatgttatgccttggtagctttctcagtttcacaaagcttattcatttctgggcgaggtaaatgagtccaaataattgaaattggaaaggatgtgaagtgcatcagagggttgcttttcatttttcatcttctagtttgttcagttctgtggaactctaaaaagattaatttataacaaagctcacttataaaagcagacagtgccttttagtgcttaataaataataggcttatgtgaaagtatggcttcataaagttaagcaagaattttggaaaaacatcaaatggaagaagatgttgaactgtttgcacaatagacaactattttgtttttattttaacagaattgagagaaaaatggctgactacaacaatagaataactgttagctgttatgatgggaaaatatcttgatactgctagtacagtttccttacatttttagtattttagagtttacaatgtgttttctcatatattacatcattaataaatgtaatattaacaatattatattatcttgtgtccttaagagatagataggaaagaaatttgttttgcaagtcagcaagtgaaggaacatgccagtagttagttgctcagctagtatgcggtgcagcttgtgttcaacatagattttctgcttcaatagccagtgtctctctacctgtaattttagatagagaatttttggaattatattgggataaaatgggtcactcagtatagaagatatagaaagagagattacattaactaagtaatagatattgttttgttctgaattatttccatatgcatttccttgtctaaagaaatttcacctgcagtctcctttaaaacatgagctggagcatgagaacattccatgttcctttaaaacatggaattctggagaatgaggagatgttggaaatcatctgattcaaccatttcattttggacataaggaaacagagatagtctataatggatgttttattgctgacagctttttttttttctttttttgagacagggtctctgtcacacaggctggagtacagtggtgctatcatggctcactgcagccttgacctcctgggctcaagctatcctcccgcctcagcctctcgagtagctgggatcacagctactgtgcatgccaccacaccgggctaatttttttgtattttttttgtggagacagggcctcactatgttgcgccggctggtctcaaactcctgagctcaagcaatctgcctgcctcggccttccaaagttcctgacagttttgagcaggtggctatgtacttgttttcctagaagtttaaaagtaaggaaatatattcttttcaaaactatttcgatgttcgatgttcaagtattggctatataatgttaaggaaataaagatttttaaaaatgagttcattttgcactttgataagaaagatggattgggtcatttccatccatattaaaatagttggttctggtttttgatttataacttaatttggtttgattcttaacagtacaaacgttaaattatgtgttcattgaacccagttctccatacccacatgtagttttttatcattatatttaaaaggacataatagctccctaagaaagaaactgaaaggagtcaactaacttaacagactgagttgtttaaaataagaaatatgtatatatttttaaaaaatttaattcaaagaacatgtattgaatggctgtcatgcatcagagatatgtgctaagcagcataaatgtaaaatgcagtgttgcattttccatgggaaacaaggaagtacaaatatgttgttctgaggaattttagtcgttcacacgagtctagcgtgagactaaattcaaacagttctggctttgccacttaccagttatgtaaccttggcaaatccttccacatctctgtgtttcagttcccttttcagaagatagggttggaattagtctctctctctctctcaatctacacacacacacacacacacacacacacacacgcacatgcacacacacacacacacataaggttgttgtaggagttaaataagttaatattgataaaatggtaaaaacaaagcctggcacatatctgctatgtgggttggctactgttgttaccgttaccactattggtaggattattctcccaccttgattgagtgtggatcaaatgagatgatccacctgacatgcctagcacagtctcatgtctcttggttgtggtgatggcatcataatcttcattatctttatctctgaagtaacccttacatcttaacaaggatgttcacattacagtcgcccagagaatttttccaaaggattcatgcccctgcagactttgactcactggggttcagatgcaccctggtcaccccactgcgaagatgccataaactcctgctttcaacagtgaaggagaaaataaatctttgaaattttccctggggttgttattttctctgagtctcagcttgaggaaatgcaagaaaaaacttcccttgaccagtggggcttgtgatagaagatcctgtaggatgctcctcaatttatgaagccttttctggattatagattaggctctgagatggcccctaaaaatctagttaacccacaaagaaactgatataatgctgattgacataaaacctcatattaaaaagaatcctattccattgccagaaactaaacaaagcaaaggaaagaagtcgtctttactgtgagtgatacaggaggaaaaacaaacatggttgcttagtagaggatggaaagaaatactgagaattttaaatgtacttctggaaagtatacattttaagaattatgctttttggtgccatcagttttgagtctaaactcaccccccaaaatccgaatttagtattcttggtataaatctagtattaattatagccggaaaaaaaaagttcttgattcttggctcaaaaattttataaaatgaagaattttcctttttcttcagggtaaatgttgcaagagttaaagaggtagagaaaagggggaacttttttagttgaaaacattatctgattgtgtatttactctgggttcagaattttaaaagtctagagtgtagctgcacctaccctggcatcctgcaggctagggtggttgtaatatagaagtacgggaaatgcaatttgctctgtagctttattctaggattttatagccttccttttacactttacacatcgtgaatgctttgtaggtcatgaatgctttttttatgtcttatattgtgacttttttaaaacaatgtaaataaaattctattgagtggctgcaccataatttattcagggaacccactatggttaggtaactaggttgttaccaatgttctcatgataaataattctatgatccttatacatcattaagtgcatcctgattatgtccagggtacgttattagaatagcataactggaccaaaaggaccagaacaatgaaaagctttttaaatttttaaatttttttttttattttttagacaagagtcttgctgtcaccaggctggagtgcagtggagtaatctcagctcactgctacttccacctcccaggttcaagtgattctcctgcctcagtctcccaagtagctgggactacaggcgtgcaccaccacttccagctaatttttgtatttttagtagagacggagtttcaccatgttggccatgatagtctcgatctcttgacctcgtgatccccctgcctcagcctcctaaagtgctgggattacaggtgtgagccaccgtgcccagccaatgaaaagcttttgatatttattgccggatttccatcttgcaaggtagcacctgtttacataaccactaccagcttgaatgcctgatttcttgtatcctcacagacaataggcaataccaattaaaaatattttatgaagttgttagatgaaaatcataaccctgttatagaatataaacggaaacctagtcaagttgaatgatttacctgtgtgggatcaaatattctatcccagaactgtctgaatttcagatactgagaacccagtcactgtagtttctaaaatgggatgcaacaaatacagtataataaaactagaagttgtttgaacacagaagaaggggcagtaaaatctgaatttaaaatgtcagagaagtgttagtactaatatggatcttgaggagtagatagaattttagtagagcagaaaactctgcgaatagactgaatgagtaaacttgttaccagaatgcaaagtcttgactgggagctgtccacgttcttggcgcaatgaacaaagaattgaacaaaatgcacaaacaaagcaacaaaagaatgaagcaatgaaagcacagattttttgaaagaaaagtacactccacagagtgggaatgggcttgagcaggtggcccaaaagccctgattgcaatttgctttagggattttattaaactaaaaaaatttggtgacacccctaggtacccttagaggcctccaattggttacaacaccctatatgaaagaaggattggcctgtgaccaatcataggctgaagtgaagccttggcttgcgaccaatcagaggctgaaggtaagctttggcctgcaaccaatcagaggcatttcccatttgtaggctagggtagagggattttgtaaagaggggagtctctggcctcttctcacttgggcatggagagatggggttttccttttggcccaattccaagaactcagccatgacttggccttaggctgcctgtctccagaccctattcttctgcctcagacatggagcacaaaagtatgctgattgtattcagagaacattgggtacttgtccatcataaatgtctacaaagttcattcatttacatttttatattaataaaaaagttgcccttttgattgccagctatgtatgccagatctttttgactgtttccaaaatttagttcattttcaaaggaaaaatatttgtgaatattggagatactcaaacacagacagcatttccaaaaaggaattctaaaaaagaaattgcataatatttgtatctttaaaataaggacataattcttcagaatgcctcttttaaaggaaacagccttcttttggatgtaagtcagtttggtatgggagtgacaaaaatgttatacttttatgttatgacttagttgatgagggaattacacaatatttcaagcaaaaatgaaaaataattcacagtagaagtcagtctgtctagaattaaattatagatttgtagaacattagagtttatggaaattgtagaaatgaccaatttccttattttataaatagggaagcagtgccttaacatctatgtagagctttgctcttaaagtgctttaatatattttttttgtgctgcccaaggtcacacaacccactggtactccatatttaagctcccaggagattactgtagtatctttcactacatcttatgtgcatttatttttgtggaacttgtatttaactttgcctggtactataattagctatttatttctttttgaccttctgaattgtaaactcttgaatttgggactataccttgttttctagttctgtggacaaaacagtatttgtaaatattgaataaataaaccaaatttcaatttttccttagatttaaaaattagtacagtaaagcagaagttctatatactttgactttagtttttttcttttcaaaatagtcttattgatatataattcatgtaaaagtcacttttaaaatgtacaattcagtgcttttggcatgttcacagggttgtgcagccatcactataatctaattttagagcacttttgtctcttcttaaaaagaaatccctcacactcatgagcagtcatttcctatttcttcccaccgcactgccccagccctaggcaaccctgaacactttctctttttaatattagattgacagtaagattttgaaaccatgggattaggtaaaagtcatggaaatataattctaattcattgtgataaatttactactttatcttagagaatttgatagttttgagttttcttagtactatctagggcagcttatgttaaatgctatgtaaatcatatctataaaatatgcacagtaatgtacttttaatagaaattatttagaatacagtacaagtaaagtataatgggaaaaatgctgaatttggaatcacaagatctagatttgattccttacttgtttgatcttatgtaatacccaagtgacatatcagtcctcagttttgtcttctagacagtgggaataatttacattccacatattttagaaagctgttataggaccagtgtattaatgtttatgaatttgctatgcagagctggagtattatggaaatcgaaatattaaatttcctatgaataaaaacaacaaataacaatcaatgacaatatttacctacatttgagtttctcaccatgcactgctgaaatgcgttttgaaaacagtgactaactcaaacttctgtgtgtctcaactgaggcggaagaatgttgaatactaaccaccttaggtctttctgcaatgcagggtcagttcatttttcttctttcctggggcacacagccagcttccatattgaggtacattctctgccagtaaaatcatactatttccaaacaacttagattcaaactggggctacataaaagggtccatgtcttcagagcaggactaatagcccctgagtctgcagcatctagtcaaatgaagtattttgaagtctttattcaatccagaattagggcagccataattttaaaaatctatacattagtaatcttagatgctgggaaggcttgaagaaggaagatctttcttgaatttcaataataattaaacattctggtaaatctcaagtggctttgcataatatgttttttgagagtgtgattttgataggtagtgaataacctgaattaatgaccataatgactgagtgctgttttgcattaattcttgaaacaaaacctagattgcttcattacatggcctgtctttgtggaagatccttatacggtgtggtggtaaagaaaggggaacatttgctctattttgaagtaattgcttctaatggaagcctaatgacctattatgcttatttctaaaagctgagcagtaagcttgataggaagctagagaaagattggagaaattatgtcatataaaccaaaatttcaggaagttgcatgtggttgagaatcagtacctcattagacaacttaataattcaatagtttacttatgccaaatgtcatccttactttaaaagctggagtgatttctagaaatgtgtccacatccttgcgggttagggtacggggcagcttctggccagctgtcgtccaggtgtcttatggtttttccgagtttcatatgcagatcaaacagggcagtgagagtagagttttcctgtgggtattgaaatggtaacatttaataacctatggtgactttggatattctcaagtttagcttcctgattttttcaagatcaggagacagaagcttaaaagagttaatcctataggattaattagtagtggcaatgaccaaactgcgatgatatggatatattccatttttgggtttcatgggactgtactaccaaagtgtattttatatgtttctaatttggactattgacatcaaatgaatcaaatagttggagtaaatgatttacttgaaggtggttccaaaaattaattaatgaaatgtatctctttagataaaacacatatggtaacatcttaacagctgttgagtctggttgtcagtatatgggtatttattttactcttttttcaattattctgtatgcttgaatatttttatgataaaatgtcttataggtaacaacaaccctattctaataaaagcttgtcagattacttgagcccttgcatactttactgttgagcatcataaaagaacttgaaatgcttttgtttttggattcttcatgtttcaacttcagatggtgacaagtgcaaaatggcttaaaagtgccttggctaggcacagtggctcacacctgtaatcccagcactttgggaggccaaggtggacagatcatgaggtcaggagattgagactatcctggctaacatggtgaaaccttgtctctactgaaagtgcaaaaaattagccggatgtggtggcacatgcctgtagtcccagctactggggaggctgaggcaggagaattgcttgaacctgggaggcgaaggttgcagtgaaccgagattgtaccactgcactccagcctgggcaacagagtgagactgtctcaaaaaaaaaaaaaaaaagtgccttaacttacctggcaataaacatttattgagtctgcagctttcattcatttagctcatttacatttaactgaaacacatttaaaaattcattttttccttttgcaaaagctaggcatgcctactataaaagtttgcaacttttcaaagcatgaaatatgtagagttgataccctcatttattatattttactaattcctgtagagatgagcaacaaaattgtcctttatgaaagctgtcattctctaaaattcgatatagtaggaaagttggtgtgtaaccttatttaacaaggcttgcaactgataacttttgttgagacaggcatgggggcccttcttttggtgttgacataatatctttttgtctttcttattcatcaaggttagtagaaagttgtcaagtttctattcttaagctctagaactatcctggtctttatctatgaaagaagcataaactttgtcaaaggaatgatttactcataataagtcaatgtgaagcccattcataactatacctttttgttttgcttttctcatttctctgagtcattacttaaagctggtgctttataatttgacttaatcacatatggtgtgattcttttagcacacatactgttgtttttaaatcattacattttaaacttctttatatctagaatttttacactgccagataacctgaattttcccctgcttatctggtgaaagaatgataggaattacaatgtttgaaacatagggttgttccttatttactgaaaattatatggaacaacatatatcattctggcttccaaggatgaatctgtgaacgaaaagagtcaaactctgtaatatttgaagagatttattccaagccaaatatgagtgaccatggcccatgacacagccccaggagatcctgataacatgtgcccagggtgatcagggtgtagcatggttttatacattttagggagaaaatagacgtccatcaatacgtgtaagatgtacattggtttggtccaaaaaggcgggacaacttgaagtggcttccatgtcgtaggaggattcaaagattttctgattggcagttggttgaaagagttcatctaaagacctggaatcaatcgaagggagtgtctgggttaagataaggggttgcagagaccaaggttcttattattgcagatgaagcctctagttagcaggcttcagagagaatagattgtaaatgtttcttatcagacataaaaacgtaccagactcttaattaattctctcctggatagggaaaaagacctggaaagggaaggggattctctatggaatgtagattttccccagaagagacagctttgcaggggtatttcaaaatatgtcaaagaaatatattttggggtaaaatacttacatttctttcagggcctgctatctgtcatgttgatatcttgttactagagagagtctgttttgtcaatcataaggtcgctgtattaatgttaatgctagtcagctgtgcctgaattccaaagagaggaagttataatgaggcatgtccaaccacccattcccatcacggcctgaactagtgtttcaggtttactttagaatgcccttggcccagaggagggatccattcagttggttgggggccatagaattttacttttggtttccaaatcagaatgaatattgctagactagaaataactcaaaggttgttggagaattttaaaatgtatttatttatttatgacatctagtttgtgctcttgattaattgctcttgattaacctccctcgtctttaaattaaatcaaaattagcaaatatttattgcggtctaggagaaatctcatttaaggcacaaagcactgtgtaaagcagtagaatgttttctttactaataaaggacagaaattgaagaccaggaattaaccagcccatgtatttcctgatatatacctgatttagtacaggtgtatttggggaaatggggtggttggttagggctggaagaaagtgaggaagagtactcaattaagtagttctcttgatattattttatattgaaaaaatctttaagaggttaaacaaataattaaggtaattaacgaagcagtgagggacacactgggttggaggcgggaggttattattctggacatacctttaactgtgaggagtgaaatggatatgtcaactatgctgaaacttgttttttttaaatctctaagttgattttgtaaggtataaaaaatgttttttagaaaaacctctgaatgtcaaagaagtataatgacagcttgaatatgcatatacagcaaatcacttataattttgtttggcaaatgaaaatagatttcattagctttaaaatagcatttacacttttactcttggatatattaaaaagaaagtgcacattttgtaaaatgtagtagaaaggaaggaagaagaaaataaaacttaccagttaaccatactattcagaagggaatattattaatgtcttactttcatttcactcttcttttctgtgtgtacacaggcatacccccatcttatcacacatagctttactgtgctttccagctgtagcatttttacaaattgaaagtttgtggcaaccctctgtgaaacaagtctatcagtgttgtttttccaacagcatgtactttgtgtctctgtgtcacagtttggtaactcttgcaatatttcgaactttttcattattattatatattattttacccagtgatcagtgatctttgatgttactattgtaattgttttgggcacctcaagccacacccatataagatgctgaacttaatcgataaatgttgtgtgtggtctgactgttccatcaacacaccattcccatctcacactttccttgggcctccctattccctgagacataacaatattgaaattagaccagttaatatccttacattggcctccaagtgtttaagtgaaaagaagaattgcacaatgctcactttaaataaaaagctagaaatgattaagcttagcaaggaaggactgtccaaagtcaggataggtcaaaagccaggcaggcctcttgcatccaacagttggccaagttgtgaatgcaaaggaaaagttcttgaaagacatttaaagtgctactccagtgaaaacacaaataataagaaagcaaaatagccttactgttgatagtgagaacattttagtggtctggatagaagatcaaaccagtcacaacatttccttaagccaaagcctaatccagagcaatgccctaactctcttcaattctatgaaggctgagagagttaaggaagctacagaagaaaagtttgaatctagaagaggttggttcatgaagtttaagaacagaaaccatcttcataacacaaaagtacaaataataagcagcaaatgctgatgttgaagctgcagcaagttatccagaagatggagctaagataatagatgaaggtggctacactaaacaacaaattttcaatgtagatgaaacagcagctttcaattagatgtcatctggcactttcatagctagagaggagaagtcagtgcttaacttcgaagcttcaaatgacaagactgtcttgttagtggttaatgcagctggtgactttaatttgaaaccattgctcacctaccattccgaaaatcctagggcccttaagaattatgtgaaatctattctatctgtgctcaataaatggaacaacaaagcctggatgacagcacacctgtttgcagcatgatttaatgaatattttaagctcaatgttgagacctactgctcagaaaaaaagattcttttcaaaatattactgctattgacaatgtactggtcaaccaagagctctgatggagagtaatgctattttcatgcctactaactcagtatccattcttcagcccatggatcgagatgatattttgattttcaagtcttattatttaagaaatgtttcataaagctatagctgctaaagatagtaattcctttgatggatttgggcaaagtaagttgaaaagcttctggaaatgattcactgctctagatgctattaagagcattcttgattaatggcaggaggtcaaaatagtgacatttacaggagtttggaagaagttgattcctaccctcatggatcattttgcggggttcaagagttcagtgaaggaaataactacagctgtggtggaaatggcaagagaagtagaattagaagtggagcctgaggatgggaatgaattgctgcaatctcgtggtaaaacttgaattgttggaaagttgcctctaatggatgagcaaaaaaagtggtttcttgagatggaatctactcctggtgaagatgctatgaacattatggaaatgacaatgacagatttagaatactacacaaacttagtaaagtagtggctttgagaggcttgagaagaacaaatccagttgtgaaacaagttctaatgtggacaaaatgctaccgagacatctttcatgaaaggaagattcaataaatggggcagacaggaagaatcagtgaatggagcagacatcattgctgtcttattttaagaaaatgtcagtcaacccttaactgagcaaccatcaaatcagggcaagaccctctaccaacaaaaaggttatgacttgctgaaggcccagatagacaatcgttagcatttttttttgcaataaaatattttaaaattaaggtatgtacagtaagtccttccttaacattgttgataggttcttggaaactacgactttaagcaaaatgtcatataacaaaaccagttttatcatgagtcaattgatataaagaagagttaaattcctacagcattttttttttatttttcttttgagactgagtttcactctgttgtcaacgaggctggagtgcaggggtacgatcttggctcactgcaacctccgcctcccaggttcaagcaattctcctgcctcagcctgctgactaactgggacttcaggcacgcaccaccagtcccggctgattttttttttttgtatttttagtagagatggggtttcaccatgttggccaggctggtcttaaactcctgacatcatgtgatccacccgccttggcctcctaaagtgctggaattacaggcgtgagccactgtgcccggcctcctacagcatatttctcatcacaaaagatcaccaaacttctaaataaagaccaaaatacttctaaaacattgaattgtaagctatgcatacatttaagaaagactagtaaatacaagtgagatacttatttacccagttttaggtgaatcaatgagtgatgtctgtcatagtggtgggagtagattaataaaggaacaaatgtttgcaaagtgaaaattctcagtatcgcctcctcccaccatgcaattccaaaacaatcacaaacaagcactactcactgaacactgaacactttcagtgcagactccatacagacaggggccctgactggaagcattgttttttctcatcaatattataatgaaagaatgttgaattaaatgacattgaatgaaacaacattattctaggacctgctgtgtattatttttcttagacataatgctattgcacacttaatagagtagtttagtgtaaaatagcttttttatgcactgggaaaccaaaaaaattgtgtgactcatttgctttgttgtggtgatgtggaacgaaacctgcaatgtctctgagatacgcctgtatgcatgtaaagcatctttgcacaaatttagaattgtcttttatagaattccttttgtttttatgaattttttttgtttgattctccctaatagtactttataagcatatttgtatttctttaactattttatgtcatatttttagggcagtggtaaacattctgttgcattttgtgttctggacaaatagctttctgattttgatcttataaggttgcaatgaattttttatgcatatcttttactgtaacaaatgattgtgttttgttaggataggtttctctgtgtatgtgctggatcaaaggttatacattgcgaggtggctttccagaaaggctgtcccaatgtctactcctatagcatatgagaacactcatctcgccatactctgattagccttgaattttataatttttatatctttgttaatttgagcattttatgcatcagtgattacttgtaagaattttttgttatatttattgaccctttgtccatgacaaattgtttatttcctttgaggtggtatacgtgtgtttgatgtttcaacacgtggttaacatctctttgatgttaagaaatgccaattactaggaagcagttctgtcatcgaagtaatgaggtatatttttccctaagtatttgagaacaaaatttcagtctttatcgtaaaaactttcgatatttcatgaaaaaagtagacattccaatgatttattaaaaatacctagtcattgatatatccattagttcctaaaaagaaagcagaagttacaagaatgggcccagcattattaaaataactagtatttttaagggaatttacttttatattttaattaattcagaaatggtctagtcaactcttgacacagcagtggtatatcaatactcagagcctcatatgatttccatcaaataaaatgtttgaattataggggtgtgtttgaaatatgatgctttccagaatatgaattctacctctgcatcctgtctccatttttctgcttccttgtaattccagatccactgggctttaaaattagatactgttttacatttgattatgttactttcgaggtctatgagcccttttcacatctaggcagtagaaacagtaagtcatatctctgagctcgtaaggtaaaccatgcatggccatgtcttacccagcacattgcctacacatgtataaggtatgccatatatgctgtagttatactccgtgtggccttctgaaaagccatataggattatgagagaaaaagaagagtgtgaagtggggcaacttccactcaattatgaatgatgttgcctgaagaaatcaattagctgattttaaggctttaaagaattaaaaattgcatgttgttactatacttcataaaattctaggccgatctgcaagattatgaaactgactttagactaatataatttgtttaaactcaggagctttgtataaatgaattattattattcagctaatggtgtgttctttctatcatgaagaagttgtctttttctgtcatgtgtctccccagtacaatatgtggaatactttgtaattttttttcaactttgaatattaaagtttgatagcataaaaaggccaggcgtggtgactcatgcttgtaatcccagcactttgggaggctgaggaaggtggatcacctgaggtcaggagttcgagaccagcctggccaacatggtgaaacccgatctctactaaaaaatacaaaaattagccgggcatggtggcaggcatctgtaatcccagctactggggaggctgaggcaggagaatcacttgaacgcgggaggcagaggttgcagtgagccgagattgcaccgttgcactccagcctgggtgacaagagcgaaactcggtctcaaaataaataaataaatgaaaaataaacgacaaaaaaaaatcactaaagtttgcaaatattttatctgagcctagtctcatatttatggaagaatccacttctcacgatatatcgttggcttccctgcagctctctgttgctattgagtaaaactctattgccttgaaaaagttattctaattactaatgaacacagatctctctttggaatgtcttggtcattaccccttggatcttaggctaatggtatcacctttgtaccaggtcataggaccttctcagttaatcctattttccatgacagttatatatccaaaacagcacggtacaaaatttttaacaaaattaaatttttcatgcatcaaaattttatagcacatctgccaaaggtttgctatacacagaatcacagccctgatatccagcattggcatataataggtatgcaagagtacttgatgagatgaattaggatagaatagaactaccagtttgctaggcagggcattgataatagaacttcctttgctgtttcattatgaaactccaattccaggtctgttcccactcttatttcattgtgaccgaataacttttccattaccattcagttttgacaagagataacctgtcaattatttgtataaaattacttagaagtgaatcaatattctgtttattgtgtcacctctactttaaaacgctacagtcctatttcttgcagctaatctcagaatctgttaacttcagtgtgggtgccatttttttttttttttggtatttcatgttttgtatctaacaactgaacttaatacttaagtataaagtaagaaatcttcatttcagattttcatagtataaatgcaggctaagtttcctgatatctgggatatttagaaattaagcagaagaaattattttgaggattttatgacagctttttactcttattttaaattctccttatctttctttgtaaatgtttgcatttttgagttactaaaaataattttcaagttttgtacctgtcttagtggcatttatgtccatactgcaaaaactctttcttggaaatttaatatagtatatgttttgtgatttttttcatgtcttaacattttaatttgaggttatttgcttgttataaccaaatggaaatatattctaattgtaccttgtcgacctgaaatgtgacaatgcagtgattggtgatcataaatgaacttagttttattcagtactatttgtaaaacaatgtttgacattgggaagttaaacaactgatctctttgttattttgatgtgatgacatcatcctacacaaaacacaacttcaaatcatatgcagcttatccatgcacagatgtaattaccaatacaaaccaaaagagagagcaagaaagagagcgagctagagggtgtctatgacctataataattagcattttcagtaacaacatctgttgctgacaatattggcagtagcacaggaaaaagcaatcattaaaattagctaatgctcagtttaagtgctacacaatgtactgacattttcaatattttcattagttttgcattttctcattccagtaagtatctgttttcaagtttgcatgaatgccttgtattatattaaaaatgtttctcagaccttctctcaaattgatctgggtcttaaagcagtatttccagtgggtcaaagtagcactgatgcaaactcttagaaatatagtatccaacactctcgaattggattctataaatttgatcttacataatttagatactgaattagaaattctccataacctgcaacacacattttcctaaaatctcattgtcttagctttcttgagtttttatcctggaatttctgtttgaggtgtaagtgccaatattaactttaaaaatttagtgaagtgtaagtcaattagaataattttacaggtgacctgcaattcctcgctcagagagagatctgttacccaggatgcttcaggtgaacgcctgtaaggaggagagaagtgaggggctgtggctccaccacatgatgtccttggcctcattgtacatcctttacccatttatttgctggtttgtaaatatgttaaagtgaaagaagaaaagtaattttctctttaaaggtaaaactcactagtgaatcaacatttgaatcatttactaagatacataaacaaatatggagtctgcaaaattgcttatgagaatcaatgttgagccagaaattatgtttctgcaaatattttgatgagctgaaatattttctatgtatgtcttgttaatcctgtctttaacaaactggatctctgttgaaccctattctgggagatagtgtgtactgtgaaagtgatttctgtggcccagtttggaaaattctgcaaattatgctttcctttggagctgcacgatgcacattatatttttaaggctatgggaagttctgctatttaactttgttcatctcaatattctctaaacatcttctcatgtcaatattttctaaacatcttcttttcttctgaaccaacttttaccatggaaataagtttaggaaatgctctttctgctataccaacatttcactgataatcttgtttgagaaaatttgcaaaaaggaccataggtttcactgggtaaaggctatttgtctgattttttgggcactttgaaactttgatgacattatcctggtgggcttgtacactagacttcatcagtacacttagagatggacactcatcatcatgatcaaaattcaccaaaaacttctgtataaactacagtacattttttcattattttggtagtttcttgtccaaagactgttgtgcccatgaatctgtataacttagaaggtcagagataaactggaagagattgaaacaagaacaaggactgatgaaataaccttgctttagagtgaccttgttttgttttatttgggactgtctcagcattagcattgaaatcctcttgctctgagaaacccctcagtcccagataaagcaggctggtcaatcactctactgccttctaacacaaatcttgtgttccccagatttcattttcatctctccacactaatgtgattgttaattttgtgtgttaacttggttaggccatggtatccggatttttgttcaaactagatgttttatgcagttattttttagagatgagattaacatttaaatcagtcaacttctagtaaagcggattatcctccataatgtgggtgggtctcatccaatcagttgaaggccttaatagaaaaagactgacctcctcagaagaaaagggaatcctactagcagatggcctttggacttgaagagcagctcttccctgggtctccagtctgctgacttattctgcagattttggatttgtcaagcctttgcaatcatgtgagccaatttcctaaaataaatctcatcagcaaggtggtagaatagaagttatcgggcctcattctctgttcccctctctcccagaaattcaactaacaactatcatcaggcaagaataccattgtgaataacccagaacttgagacatccacttgaccacagaactgagaaaagctgtggctgaacaataagcggaacagttttctttgactgtaccacccctcccccaagctgggacagtggcacacacagagaatttccctagacccatggtttctacagggggaaaagtgaattggaggaggatattccatttcctcgccattttgggtccctttgtgggagggagatatgtgaaggacatgaaaaagttcttgtgtggctattttagaaagtacttgagataggttttatctcagacatccacacacgacctctctatgtgctttgctggctgcaatttgtttgggtttgagaagagtaatttcatcttggtatctgcaacttttatactacaaagtaaaaacctatagtagttgcacaaagtataaaaagaaaggattcaaaacatacaaccacagaaaaccagaaaaaccacaaaggaagacagtacagaggaagaaggaaacaaaggatctaaattagaaatcaaattccaaaacggcagtagcaattcttacctatcagtaactgccttgaatgtaaatggattaaattcttcaataaaataaccaagactggctcaatggatggggaaataaagaatagattaaactctctattataaaaagatacagagtagccaaatggattaaagaaaaagtaaggtctaatcacatgttgcctagtagagacttgctttcctaataagcatgtacatagaaagtgaaggggtgaaaaaagatatttcacacacatggaaacccaaggagagccaggggagctatacttatatcagacaaaatagatttaaagtcaaaaaccataaaagatacaaaggaggctatcacataatgataaaaaggtattaattcacagacataattgtaaacgcatatgaatgcaacattagagagcacctaaatatataaagcaattataaaatgacctgaagggatacgtagactgcagtgctaagatagcaagggaccacagcatcccactttgaacagtggacagattatccatacagaaaatcagtatagaaactttggacttgaattgcagtatagaccaaatagacctaacagcacattccattccacagcaacagaatacacgttcttcttaagtgaacataaaataatctccagaatagatcagatgttaggccacaaaacaaaccttagcaaatgtaagagtattgaaatcatatcaagtgttctttcagatcacagtgggataaaaccagaaatcaataacaggagaaatcttggaaaataaacaaatatgtggaaattaaacaatatgctcctaaacagccactgggtcacagaaaaaattagaatgaaattttaaaatgccttcagacaaagaaaaatggaaacacagcataccaaaacttatgggatgcagcaaaattagcagaaagggggaaatttatagcaataaatgcctatatcaagaaagaagaaatatcatgaataaacaatctaatgttacacctcaaggaacaataaaaagaagaacaagctaatctgaaagtgaccagaaggaaggaaagaacaaagatcagagccaaaataaatggaatacagactagaaaaataaaagaaaaatttcaacaaaactaagagattcttttttgaaaaaaaaaaaatcaacagaccattagctagactaaccaagaaaaaaaaaaagacccaaagaagtaaatatcagaaatgaaaaaggagatattacaattgatactcccaaaatacaaaggatcataagaactgaacaattatacagcaactaattgaataacatagaagaaatgaataaatttctagacacacacaacctatcaagattaatcatgaagaaggagaaaacctgaacagaccaataataagtaagaagattgaatcagtaataaaaattctcccaccaaagaaaagcccagaattggatgactcctctactgaaatctaccaaatattaatgaagaactaataccaattctaagcttttctagaaaatcaaagtagacagaatacttccaaactaattttacaaagctagcaatacaaaagctagacaagcccaggcatggtggcttacgcctgtaatcccagcactttgggaggccaaggtgggagaatcacctaaggtcaggagtttgagaccagcctggccaacatggtgaaaccccgtctctactaaaaatacaaaaattagccgggcgtggtggcacttgcctgtaatcctagctacttgagaggctgaagcaggagaatctcttgaaccttggaggcataggttgcagtgagccgagattgcaccattgcactccagcctcggggacaagagcaagactttgtttcaaaaaaaccaaaccaaaccaaaccaaaacaaacaagaaaacaatagggcaatctccataatgaatacaggtgaaaaaaccctcaacaaactattagcaaaccaaattcaggagcacataaaaagagtcatttaccatgatcattgggatttatccccaggatggaaggatggcccaacatatgcaaatcaataaatgtgatacatcacagtaacaaaatgaattacaaaaaccatatgttcatcgcgataaatgcagaaaaagcattagaagcatttgaccaaattcaacaccctttcataataaaaactctcaacatattagctgtagagggaatgtacctcaacacagtaaaggatgtatagacaaacatttagctaacatcattcccagtggtaaaaagttgaaagcttttcctctaagatcaggggcaaggcagggatgcccactatcacaacttctgttcagcatagtactggaagtcctagccagagcgattagggaagggaaagaaattaaaggcattcttacaggaatggaagaaatgaaattgtctccatttgcagatgtcatgatcttctgtatagaaaaccctaatgattccactaaaaaacttctaggactgattaataaagttgcaggatacaacatcaacatataaaaatcagcagtgttttcatatacctatgacaaattatccaaatagaaaattaagtaaacaatcccatttacagtagcaacaacaacaaaatacttaggtataaatttaaataaagaggtaaatgactgtgtactgacaactataaaacgctggtgaagaaaaattaaagaaaacacaaataaatggaaagatattctgtgttaatggattagaagacttcatattgtgaaaatttccatactacccaatgtaatttacatatttaacacaatctttgttaaaattccagtgtcattttttacagaaatagaaaataatcctcaaatttgtatgaatccacaaatgattctaaatagctaaaacaaatctggagcaagcaaacaaacaaaaaacaaagctggaagcctaacattccttggttataaaacatgttataaagagactgtaatcagaacagcatagtactgtcataaaatcggcatgcaattccacgttgatccatggaacaagatagaaaacccacaaataaacccacacatttatagtcaactgatttttgacaaaggtgccaggaacacacaatgggtaaaggacagtttcttcaatgcattatgttggaaaaactggatatccacatgtaaaagaatgaaagtagacccctatcttacaccataggcaaaaatcaacttcaaatggattaaagacttaaatataagacctgaaactgtaaaattcctagaagaaaacatggggaaaaagtttcctgacattggttaaggcaatgatttttttaatatggccgttcaccagcaaaaataggcaaatgggattgaatcaaactaaaaagcttctgcacagcaaaggcagcaatcaaagtggagagataacctacagaaggggagagaatatttgcaaaccgtacatctgataaggggttaacagccaatatatataagcactcaactcagcaagaaaacaaataaactgatttaaaaattgacaaagtacctgaacagacatttcccaaaagtagatacagaaatgatcatcaggtacaggaaaaaatgcttagcatcactaattacttgggaaatgcaaagcaaaaccacaatgagatattacctcaccccagttagaatggctgttgtcaaaaacatgaaagataactggtgttggagaagatacagagaaaaggaaaagaactcatatattgtgagtgggaatgtaaattagtatagccattatgtaaaatggtatgaaggttcttaaaaaggtaaaaatagaaatacatacaaccaagtaatcccacttctgggtctttatatccaaagaaactgcaatcagtgttaaagggatatttgcactctcacgttcattgtagcattattcacaatagccaagatatggaaacaacaacaaaacatccattaacagatgaatggataaagaaaatgtggtatatctccataatggtatactattcatcctttacaaatggtgtaaatcctgtcatttgtgatagcataaatgagcctggaagtcattatgtaaagagattaaagtcctttgtaaagaatgataaatactgcctgatatcacttatctatggaatctaatacatttgaattaatagaagtagacagtagaactatggttatcagaagcttggtgggtgagggagggagagaaggaaggggaaattgttgatcaaaggctacaaagtttcagatagataagaggatttatggcaaaccaaggagagacatgaatgaaaagagtggctaccaaccaaatcaacaataatgtgttatgtatttcaaaatttctaagagaataaatttgagatgtcttatcaagaaatgacaggtaagcaaggagatgaatcggttaattagtttgattgatcatgccgtgttgtatccatgtatcacattgtatcccataaatgtgtaccactatggtttttcaattacaaaacaaaaacaaaaacactaaatgcatgttgtatgatttcattcatatcacattttagaaaggcaaaattatggttatggaaagcagttcaattgttgacaggggcttgagaattgactacaaagggacatgaaaggactttctagagtgttaaaaatgacctatatgctgattgtggtggtggtcccgctactgtatacatttgccacgactcatcagattgtgtacttaaaattttattttaaattaattatacttcaataaagctgacaagaaacccctccccaaagaaaactgaggaaggaacttataaaaaatagtgatatgattctcttgtattttgtaaaattaaatatatatacacgcattaaaatgtgttctaatgcatgtatgcaaacatatatattttcaaaacactattttattttatcttttcccatactaaaagtactcatcagattgtcattgatttcttctttcctcctctcacctgtgactgtgggaaagaatgattctctcattatgagtcagagccttttttttccttttctgaatttatagtaacgactcaacactagaagtctcagcagcttggtttgcctgtcattaattttaccaatggttgcaggtgtagcctgaaagaataggtataatgctggtatgtaatgctttctcctgcttctaaaaggtgctgtggggaggtgttgaatgagattcatggtggtaaacaagaatataaattcaaatattatcttaaaacagaaacagtaaagcatggagaaaagatccagctgattctagaaagagcaaatgaagaagaaacaagagtgaaaagagtggctaccaaatcataggaaaaaatacaggagtcccaggaccttcccccaaggacagattcctgggaaggtttccagtgagtttttgaacctaaccgctaggttaaatacatccctttagtctcagctcatcttcctaattaagtacaaattcgaaaataattgtaaggttttctcagatatgtgatggattacatgtcagttgcatcacattcttcaagcaaagtaaatgaatgaatgaacaagggaatgaataaacaaaaggagctagatattccctgaacattgcaagcttcctttggcctgtggtgcttccattaccagcagcacttcagttagaatgatccctatgaattaacttgtaaatgaggaggtcaaatgtgcttttgcacagtggtgttaaatatgtggatgaataaattctttcttgtactttgggctatggagtctatgtagggttagaaatataggctttttctaagttgttctcctcttaggaaagttatttacatgataattaaagaagtttagaagcaattcctgaccttaaacaaagataacgtgtagctttcaatatatgaacctttaagaaaccctcaacatttcaaaggcacaaattagagcattagtctaaataacaaacccccctctttcccgatattcatttatagggtataaaatacttgacagaaaagttgagatacagaaaagatgctaaatttcatgaaacattgttatgaatcaattacagacattttagtttatttaaaacagtttgtttgtaactgttcagaaatacttacattgaaagaatgtccacaaagcactagatctgtagtttcagtggagagtcagtattatatattataatattataaaatgacacacttctcaatggcgcagcttcctagaagtcatttcctatattacttggccataatcactattaattcagtttcataaatgattggacatgatcttttaattctgagccttcataaatatgatttcctctgtctgtttagactgttttctttaggagtccacttgtctaacttcagttgccatctcaggcattacttctcctgggaagcctatctcactgcctttccctttagacacctggactaggagtttctctgtgctcatatgataccctttaggactttttcattcagttagtttctgaatcctttagctcaaaccagaacactctaagtcacgcttgattgctcattttttcacctaccctatgtattcctatttgttgtacctcagctagcacattggtctctgcctccaaagtatattcttaatcatctgtctctcttcattttcatggttaatccatcaaagccatgccattttatccagacaaatggagtagccatctaagtgttgtttttgcttctagtatttgaagcaaatacataacataagttatggaagcaaatacataacatgacataaaccaagtcatgtcagttctctgcttgaaacaacccaaaggctcccattacacttataataaaatctaaaccccttacgctgccctaccaggtcctacatgatcaggcagggccatttgtctctctgacattttaaaaatttttaaccatcactcctgtcccctggcccactgtatttggctcttttctcttccttgtacataccaagccttcctaccacaggacctttgcactagtgtctcattatcttgaaacagttttcactgatctccatgttgtaactccttctcggcagtagcattggaccctaaggatgtacaatgttttatactgtgtttaattcagttactctgaattagataagcagtgggccttaacagcatacaggtgaaatcttgaataatttaacaagtattgattctgaactattgttaaataattcacacagttaattataattaccattattgcttaagaactacttaataaagcagggtttgtggctagaatttaaagacaatttgttggatacctttaatctatagaaatgtataataaagatgagagaaataactgttagcgaatcctttggattaagctacaagccattataatttgcagtagcaagccttgtaatgctaatgacaaatataagtcagtttgtttcctatgcactcatggatcagtggttacttcggaaatttgtgttttgtctgatagttttttttttttttgaaaagcccttttttaaaaaagattttaaaaataaaggtgaatttcacacaatctaaaattaaccaaagtgaacatctttggtagccttttactttgatttttatgtatattattatagttatttaatagcctctaaaaatacccagaatggcttaccacttccttttcaagaaaagaattctttagtctccccaaatcttatgcccactggctcattgtacagtctctctgaattctatgccagttccgctcttataaattgtgagcctgtgtttcttgtgccaggttctattccaggcgcaggtgggcatcagtgcagccagcccgccatagcgttctaccacctggtgtagaaatctgttaggaatacgggaagactatttgtggcctttattgactatcctttgcctttgaatccgtgagcagaaatctattattgaataaagtcccatgaattcaattcaaaccctgcattattgattttcaagcagaacttgtgccataatactgttatactgtagttggttacattcagggtcaatagaaatgatttcttgagatatcagtggataattttcattgggattagtcaggaatgtgttctgtcttccatctgtctgcacattgtgagttcttaatgatttgatgcctcttttggctgaattatatccaccataccatcactctggtgagcaaaaagagaagcattctgtattatacaaatgatatgtttagaaacataactaagaatgtttttaatcacccactggcctacccatccaatccctgctatcaattaactattctgaaaccatcatcatgatttcacatgatatttcctctatttaaagtagtgtaactgtaagtcacctcaatttggtatccaggtttgcgtttggcaataaattcctcttggcagcttcagcaagttatatttcttaatactggatctgctgaggttatgtttatggagaccagaactatgagtattgatttatgtttgctttgaacatcttccagtctaaagtcattgtggctatgctttgttgatgaactgcaggagattgcccttgggattgcattgagtgaacttggcccctgtacttcttcagatcatttcaggagagttgaggtggacttctctttaggaaggtgttcttttttttcagctcttcgtaaatgtccatcagtcttgctctgcatagccaagctgttgaagcatgatcaccttgcattgaataagctgcacagagctactgttctaccggggagtatgcttgcaggggagcataatctcaaatttactgctacccactcggtaccatgcagagcttgcttgggagttcagggaggattgtttgaaatgggcagttcaactattcttccagataatcaaaaaagccatccctcgatttagcagaacattgagaaatcctttcctttgactgtattgtattgtttctctaaaagcttgctttgattaaattgcacctgggtgtttaaaaagagaatacatgtgagtgttaatgcacttacattgtaattcagatggatcttttttgcaaactaaattaaaaggtacagagaccattcagagaagccatctgtcactatttgaaagttataattagggtcataatttttaatgtcattgtcatacattggaaaatggaagctttgggatatccactggaggttttacctctcctctacaatgccacactaaatttggaaatttattcagctgaaattttttcaagtttaaatattatatttactttttattgatgatactactaagtacagtgcttccttgagtgtattccttaataaatatttcttcaatttgtttgaatattttgccacaaaccagtctttagcttgacatttgaatttaatcttccatgtattaactaggcatgtacaaaacacatgcttatttattaggcatgcactaactgtactttggttacaggctaaaagactttagagttggttttcaaaatctatttgcttcaaagaatcttagtagtcagtagttaaccaagaaactttaaaaaaatgagccccattttaattttatttacccatctagctattcatttatttgacagatatttatttttgtgcctactatgtacttggcacaatgataaccttttcccagttcttttactctgttattattgtttaaagtttggaaattaaaatactctatattatatgctatattagttaaagctaagcatggtgctgtatcattaaacacaacaataacagccaaataaagttagaacacaccaaatatgttttatttacatgcaaatatttaaaatgatatatttaggtatagtatttaacaacttttatgttcctcacatcagaatttatattctttcaacaagagcctttttaaagataaggattaaattgaccatgcataactttgatgtgattaagctatttgatcttttaaatagaatcattcgattttgctgacacttagcaatagcccattattttagatataatttctttgtgatcatagtaagtttagagtcatagatgactccctcgaggtcttagtagcatattatgaatttggtatctatgtgattaaataagcacaacaaaattcatatcaaattggtcgataaacacatttttaatattgtgccagactatcattattaatttttaaatcaatatgtagtagtatgaccacaatgtcatattcattagtaaagtacagctgttttttatgccatcaggattatttggcatttaagcagtgccttctactttaaatgatgccattatcctttgaggactctgcctatcaatttggtcagtctagaaatgcaactcattatagaatgaagctgaatagttactgaagcagaatacaactttacaacctcttaaaccagaatatgggagaagcccaatttacctttaaaacttttgggtgtctacacagaaaaaggtgttaatgtgccttgtgaaatttctcaatggtgaatacattttttattctatgtgatttatttctggagatgtacattaatctttgtgaagttgctgtggaatttggttgggtttgtcaaaatgtgtcaaaaatgtgaaatatcccagttctactaattttctaacacaaagttagatggacaaagttagatgacaaagaagaagacaaagttagatggactccataggagagaagaggacttaaaaatgatgccttaatatctgcccccattttgaaagtgaaattttgcggataatgtttctattgcagttgagttagaaataaggaagcattttaaaaccaggtggatgattcaacactagaccacccaggaagggcattccttctgtaataggaaaggtctttaaacctggagtaccacatcacatgtaatgtgtaagtgtggatatttctggagctctcccagatatccagtgtgtctgcatgaatgtgtctctctttatcttttttgttaaggatgcaaatggagagttatatattggattcctcttgcatcactttagatgccttctgtttatattgagcctggcttatttggagttagcttgtaaatttaatgagatcattgtgatggccatgattgcagaatggaaaatgtcactactatgtgccagtttgcttaaatcatttttaagtacccacctgtgctgctaaactctccatttgcattttattggctactatgtttttgctccagagcgggttcctttaactctgatgcctgggtaaattaatcggggtgtgcatgccattgcccttttagcttctgctcctgttctaataaaggctccatctgcttaattggtagacttacaggcctttcttatttcaaaaaatcactttgaaaaaaagcatagcttctcaagggaaagaagaaccagaactcttgaaaaatgtattatttgggagatgttaaatttctgccatcactgtgctgagatgtatgtagtcaatgagaaacagcatccaagataatactggttttcttactactttttttccatctcttgtacatctctatgtctgtatttcatgaaaacctaccttctctaataaaggtgtggtgagctggggacaagacaactctggggatttacctgttatagacaaactctttactttttttctttttgatctggctgccttcttggtgatattactatgagaatgaggagggaattaaggattattgtaaagtgaaatagcagctttgaggtctgaaacactgagggagaagaaggaaaagaagagacatggtaaggattctaaggaggcctgaagatatctgggattcccattctttttgtccacagcatacttaggttggtcaggtgtaagtgaggagagcttgcatagtaagagcagctccagtgtggtattagtagggttaatgattgagtgtgtgatttacagtattggatctaagggtatcatgaagtcagactgtaaccttggacaaactagttaacctctttgggccccagtctctccatctacaaaatgagagtaattaatggtggtattacctcttagggttgttgtcaagattaaatgagctattacaggtaaagtgcttagaaaaacgcctatttgtaatattcatttttactaataactgttattaggagtgggaatagcaatttcagtgagttataaaacattgattatgaaccattttagagaacgatagttgttttattgctaatgtgaacaaaccatactgtatatgaaactttttatggttctccagagaaaccatgtatttttttctgactttgtacctatccttttgcttggatgcctttcttctagaaagttttactgatccttcagggcccatatcaaatgtatcttatcagtgaattgtctctcatccctttcagacagaatgagtttacgccctatcttgggctcccatagcacttatctcgctatgatgcaattctcttctcagatttgtatattctctccttgatggcaatgcagagtcttctcatagtgttaataataacatatgtagcctgtgtatgtgaaacaggtggatgttgctgatacttaattaggaaaggtatagtgattctcatcgtgttcacaagtcagactctccttatacctcaatcactgccgtatcttttaccttgcatatgagacccccagtataagagtgtaataactatctgattcatttgctagtaatgctgaagggaattgttaagctgatctgtttggtttatggaaaagatgtttattcttcctacgccttctcttttttctcctttgcctcctccttttgtccttttccacctcctcttcctccttgtcctcctttttcttccttctctctccctcttctcctttttttggttataattagtttatttaaagctcttgcttatttttgctcatccttaatataaatagatcttcattgtattcgtgacatgttttatcacattcttcatgaaattttaataaacagttgaatattttctattatttatacatatgtgtaatattactcttctcaaatataccattgaatgagtgttttatcttacaatagatggtatccatttttttttgttgtttttttttttttttttttttggagacggagtcttgctgtgtcgtccaggctggagtacacgatcttggctcactgccacctccgcctcccaggttcatgcaattaattctcctgcctcagccacccaagtagctgggattacaggcatatgccaccatacctggctaatttttgtatttttattagagatggggttttaccatgttggccaggctggtatctaactcctgaccgcaagtgatctgcctgccttggcctcctgaagtgctgggattacaggtgtgagccactgtgccaggctggatggtatcttctaatcaagaaaagatataagtatttttatgacatcaaatttaagaataatagccagttatatatttgtgggatcatgtgataagaaaaatatattggtttactattttagatggaataataatgtgtcttttctgatatctttacaagaatgttagaaatcatctgtattgtaatgttgttttaccttatccaaggggaaataaagcatgaacatttataggcttttatttataaatggacttttaaaatatgttttctcacaaagaggaaatttagctctagaaaacaggaaaggattgtaggaactcccatctgcattggaaagtgactgtcactctcgtattggacaatgattgttgcagatgatacctgtttcattctggatcacctttgtttttaaaatgagacataactaattaacagaagagcaagattattggcaactccattaatattagtatagagacagtgctagcaacatggcattttaaagaattacagtggcagttctcccaatcagccagatttcttccagaaaattataaaggaatctcctagataaacttattttcccactggtgttactttatcagcctaagtagtagctctgtaaatagaggactgaacacttgagtttgggtcctgattttgtaattagctgtgtgaattggatcaagtcgtttagattctctgggcctcaatttcttcatctgtaatatgagaaaggtcgaaataattgatttagcaatatattttatcaatcagaaatattagtgatgtcagtgaagcttgtgtatataaattcattttttcaatcatttaaggaacttagatataaaatacacctttaattcacctttggaaattttttacaaagtgttttatttgcaaatgacagtgatagtaagagttaatgtttaaggctattttgtaaatgactttaaatgattctaagtacttgttactcttaactacgctgtttcattcatacattgaaatagatcccctttggaacactggggaagattgaagattgcttttaatttcattatggcacacagaatttagtgaagaaaaatggtagtcctctttcagatagattactaagtcagctgtttggaagtcttggtgtaaaaatgtcttagagctttgcaagttacagagatagaaaatgtatttaattttaatatttctaattcactatttgctttgttagtatttagatttcagtgcttaaaaaattattcacgggattttttcccttcattcaacaacaggttctatagcacatcttgggaaaattatcctgcattggtaggggactgaaagacaggaagatgaaaaatacatgatacctttaataatttttgaattttgaattttggaattttagagggcagataaaactatatctctggggcaataaaagaagacaagtagaagaaagtaatcattgagagagaggaacaaagtcttacagtaattcagatttgggagattatttctatttgggaaaattggccaccaggtagatgttttatgctgggttcctaaaggtagaaatggtgggaaagaaagaaaatgacattgagggcagaggggacagcttgattagtggcttgggaatgggatgaagccagtgttgccaagtagtgtctgttaaaaggagcatattgggaaaatgaggacagaaaggtaaaattaggtcagataatacaggattttgagttcttgtcaaagaatatgaacttgagtctagatttgagtatattactgaaggtttttgagcaagggagggcattactgtgctttagaaagattaatctggccacaatttataatgtaatacagaaaagtaataggtggaaagaagagggagaccaggcacgacgacagtaagagcttagacaagagtcagccaacaaccgaagaatggaaatgtcactgaaaatggaaaagcagaagtagatgtgggcagtttgaattggtagaaaatagccactgatacctggttatcatgggtgtgcgagaggggagggaacatttggagatacttccaaaatttcagttcagaagatcagaagggtggccgggggccattaccaggaagagtgaagtgagggtaaggttgactggggctgggcagaaggggcaatgggaaggagatgaggagttttcggcttcattgacatcctggcagctaagtcagctctccagctagaaatgtgcagcaggcagtggtgatacagtactaagataggataggaagtcaggtctttacgagagcatttcagtaaatagccttaggaacttagattaaaaatcaatgcttgatgaggcagtgagtctagatcgtttttgacagtgaaatcaaataccatgaatacgttgagggagtaatgagacagagatttctttttagaaaagagagcggaatgtgttttctctgagggcagagtcagaagagaggacaagatgaccattataacagaggaaaatagtgcttctgaaattccatttcactttccacagcagtggctaaaattgaaattaaggcactctaatggctactaacattgaattattggattggcaataaaggccctaatgaagtactttcattaggaagaaaatatccacacgtctggaagaaatagtgtgatgccccctgtaaagaaaccagtgaatgtaacgtttcaaatatggagcagccacagcagacttctgtaattctaggtcaacaatgaattaatagaatcagtttcttgttaaaataactgtcttttgccttcatcaatattttagatacccttactggctacctgtcttatggaaagctatgtaattatactattttgagttggatttttatggtttatgctttccatggaaatttgatgggataatctgtttgtgaggtatttatctgcatatttgattccttaacttacctgcgacttcttgactttgttggttttcagaattaaaaacttgaaagaattttgtttattttggcatgtaaagaatactggtctaaaatcacaaccattagaattcatttagatttttcaaaggaagtggttgaaaagccggaggactgagataaattggtgccatgttcagtgagaagctggcaaatttatgaaggaatgtgctaatgcaaatacttatgaattgatttgctctacatattttccctagggccccttagtcctctattacttattagaatctttaccttctgtaccacagaagtaaacctaaagcacagccttactaagattgtttttgctttcatggggccagttgaatatatttcatcttccttttatgtgacaaaaataattgagaaacatcaaatgatgtttaattgttttgaaaacataaacaaaactggagattttataaagccttgttctaagcttgaaaagaaggaaaaaaaatcagtttctggctgaaaagtttctgttgacactggaccgatcaaacagttttctttcagacaatatttctatagctgtatcacagaaattaggggctgacagtgaccagtagtttattttcattgcctcatactttcaaagaaagcaaatatggacttgtatagttattaattaaaaatatgttaagcagtgatgggtgtttatttaaagaattcatgcaaatcttgatttacatttttaaactagtctattatctctcaccttttcagtttgtttaccatggtactgcaaaaattatttcaacaaacatctgaaaaactctccttatcacagggtcagtaataaatagtttgttatcccaagcatggctttcagagacgtctgcaggttttctgggcacaaagtatcactccaatctcctttaaatcagtttccctctcgcaactggtcaagggccagactagagaagaacccaaatgacattccgacctcaaacgtgaatccgctttcctccccgcctttctgcatttctccaattctactccaccttcatgagttagaaataattcctcttttaaggcagaaaaatcggtagatttggttacagtgggtttgcacatgtccacagctgcctacaggccactcagtttcccccaacactgagattgctgcctctgtagcaagtttgtgttgtggcttttcttttttcttttgagacggagtctcgctctgtcgcccaggctagagatgcagtggcacaatttcggctcgctgcaacctctgcctcccaggttcaagcaattctcctgtctcagcctcccgagtagctgggactacaggcaagcgccaccacgcccacctaatttttgtacttttagtagagatggcgtttcaccgtgttggccagaatggtctcgatctcttgaccttgtgatccacctggtgttgtggcttttcttatacacaaatcacagtctgcgtttgtgttacctgcatgtctcttttaggcatttcagtttgcagcctctggtttatatcttatgtctttgtagatcattgagaaataagatttgatatatacaaacaaaacactgacctagttttaggccccattcagtaaccttttgccctacctgtgtgtgtgtgtgcactacgcggcagatggggggttagggggctggggaggagcatggcacagtgggaggatgaatgggataggagggtggggtggggtagggttgggggtagagttgtctccaagaggaagatgttgggtacagttgtgctttgcacaagggcattacatctaaatggtgtcattcccattgtaaaggccaaagcattgtcaaagggagtaatagctgttacattcatttatcggtttactttctgtttcttcatgtgattcagataagaggcgtttttaataatattgataacccttatctttctgtctttgaattcattgctctattttgtaactctgttaatatgatctttttaaaaactatggtgaaatatacaaaatatggcattttaaccattttaagtgtacaaatcagtggcattagaaacatttacagtggtgcaactatcaccattagccatctctggaatttttttattatctcaaacggaaactctgttcccattaaacagtaattccccacttcctccttccctccaatccctggtaatggccactctactttctgtacctgagaatttgactactcttaccttatacaagtggaattatacaatatttgtctttttgtgactggcttatttcattagcataatgtcctgaaggttcatccaggttgtagcacatttctgcatttccttctgtgtttttttttttttttttttttgaggtggagtctcgctctgtcacccaggctagagtgcagtggcatgatctcagcttactgcaacgtccgtctcccgggttcaagcgattctcctgcctcagcctcctgagtagctgggattatgggtgtacaacaccactcccggctaattttttgtagttttagtagagacggggtttcaccatgtcggtcaggctggtctcgaactcctgacctcgtgatccacccgcctcggcctcccaaagtgctgggattacaggcgtgagtcaccttgcctggccaattttcttcttttttaaggctaattattatgcatatatcacattttgcttatctctttatcatctatgggtacttgggttttgacttcttggctattgtgaataatgctgctatgaacattggtgtacaagtatccgttttagtctctgctttcatttctttggggtctatataaacatgacgttttaatcagatattttattcacctctcaaagctcttgttccagtgttcacttcctttgaaaaatctgtatgaatatagtattcttttattattgtactcctgagaggagggtgttagccccttttttttgaaatgtgtgcagaactccagtgcttaaaacttccaccagaaaccattggtttctatcccacaagaattccactgaaatgcttctctttggaagccctactgagctgtttaaactgtgtttctttagaacttccaacattttcagcttttccttgactttttctctaatagacatgctttagttaaagctccttcattctgagttgttctgtgaactagatttcatggtttactaactcatatcctaaatagaatcatccaaaagaacgcatagaaacattctgttgattccattttggttggtatgtgactattaagggttcttacagtatggtgaatctcagattcctcagggggctccctgaggctgaggatgatagatctgacgattcacaactctcatctctttgggatacattggtcattgttacagagttaaactgcccgggcagataggaggttctggagttgagggctggtttaactgatcagggcatttaacctgtgtggcattggacctgtaaaatatgacaaatctttgggctggaggaataaggttctgcaactgttaaatttgattaatgattaccctgtgtatggaaaattgattattacattggtagctctctttatgaaattttcttttattctgagcatggccaatagcagtacttatccacattcttgaaaatctttccctttgactgtgacatacaaatcttcattgcttaccttgaatcttaatatcatgcgtgagcaaagtgttagcatatttgcttatttgctcttacttatttttcagaaggtgctacatagtttaaaaaaaaaaagcaaaaaggatgtgtagtaaaaaatctagtgtactgcgtcctaaatgacgcatcatgaccatagactgtcaccgcccttgcaagaggcagccaccgatgccagtttcttgtgtgctcttccagagatacttgctgtattgtcttttattttaaagtgtggcatacatacaggaaagtatgtaaaacatacatggacagcatgaagaatcataattaaaacaatcactattccaagttattgctgatccttagaagctgtctgtgcctccttgatcagatcccccttcttctctcaaaaagtaacctctattctgagtcttgtgattccatgtccagcaaggaagcagggatgttgcatcctaaatgcctaagtgtttaagtctagagactaattcctttaagcattgttggattgttcctggtgcttttgaactccaatgtagatgttgtcatgtaatcactgtgctcctcatctgagctgaaactttgcttctgctttagccatggcatgatttagatatgtgaaagataattccatctcctttgtaatttaatttatttgtgtcattttaggcatattgcatacctgctaatgtagaatggagatctagaatatggaagacagtttaaaacattttaaagcattcaaatgtggcattctggccgggcgtagtggctcacgcctgtaatcccagcactttgggaggctgaagcaggcggatcatgaggtcaggagattgagaccatcctggctaacatggtgaaaccccatctctactaaaaatacaaaaaaaaattagccaggcgtggtggtgggtgcctgtagtcccagctactcgggaggctgaggcaggagaatggcatgaacccaggaggcggagcttgcagtgagccgagatctcgccactgcactccagcctgggtgacagagcgagactccatctcaaaaaataaataaaaaatgaagtggcattctgattgggagttactaagcatatatattataggaaggattaacactcaaaaggagagcttagtcttgttaattttcatgctttgctgagggcctgtgtattagcctgttctcaccctgctaataaagacatacctgacactgggtgatttataaaggaaagaggtttaattaactcacagttccacatggctggggaggcctcacaatcgtggtggaaggcaaaggaggagcaaagtcacgtcttgcatggcggtgggccagagagtgtgtgaggggaactccccttcataaaaccatcagatctcgtgagacttattcactattatgagagcagcatgggaaaaacctttccccctgattcagttacctcccacaatacgtggggattattacaattcaaggtgagatttggatggggacacagagccaaaccatatcatcctgatacaaaacaggtcattaataaatatttattgaatagaattgagctggagagtttgttatatgcatatttaagttactctgcataccattaatatgtttcctcggtttgtagtcctgaagattaggcttgagttcagtatttatctgcttatgtgtcctgtgctgcaactgtcaccctccttgtccctcattcagccctgctctttcacaataaccaccccaagaagacttttcagatttttttttcatctgcatgtaaaaaaaagaagaagaaagaagatacttttattattttggttttggttcttctctcttccctgctttgccttcccttcatacatgcagtggtattagcggtcatgtcccctgaccttggttgaggcaaagcagagggtgtcatatcagttgcagtggaaagatccttctctgtccttgtctgtagctgaacctgctaagtgatattcccttctagtatgaggatggagtacaagtttttgaggttgcattgctgaaggtaaaaccaaaagagagagagagagaaagagagagtgagtgtgtgtgtgtgagagagagaggtgtgtgtgtgtgtgtgtgtgtgtgtgtgtgtgtaactattcttttgaagatgacttggaactattcctaagtaacctcctgtctggcattcactaatttcacctggccaactccagcaatgctgatcttaggatatcttattgtatagcttatattccaaatattggaggaaagagagggagtttggaaagaagttttagtttagagagctcttaaagtactcttggctcatcattctttaaattccaaaaatgactaatttgtggggatacataattaaggaagaaaaggttttgtgagggaaaggagtagcagggagtgctgagagcttggcgtatgtattggaaaattgtggtaacttaacaggtaatcaaggatgttgagagaggtgcttgtcatcatttcaaaagagcgtagaatattttatttcattttgtctactgtggatcggttctcctctcatttacttcttttcacatttcatatttgggagggctttgggctctatcttctatttccttctattaaaaaaagttttataagttattccacttggcattcggaacacaataatgtcatacttcactgaggcatactaatgctctggaaagaaagaaaaagaaggaaaattaatttagagggaatggaggctaaattttccatggtgaagaaattctgaccttttctgagttatcgtaaaagactgacattgctaccctttggatgttaagaaaaagtctttcagataccttggcttgtaagggacctgggaagcgccagggtccatcaaaaatgtaaagacatttattagaacatgcatatccgaaagctttctgaattctgtggggaccatctagcttttacatgatcttgagggaaccaaagttgtactgagaaaacccagtttcctcttaattccatcctatgtgaaaacaacttaagtctcaactgcactaagttatgaaaatggatcctctttttttaacatttggtttttggttattcatattgtctatattctgttctataattgtatccaagtgttaaaatatattttataaatatactgacactgaaaaagaaatcaaaagctgagaaacgtttgtgaatatggctggagagtctcagtaagatgggggacatctcctcaaattgaagatctgggaagtaagtaatagaaacttacagacagattgaggtgcagttttttttctacttttttttcctgaaaatttcagaaatatgagaagtgaaataatagcaaacatgactcagacctttataaattgtctttcttgacagcagagatgtacaattttgtaaaatattgtcctcagtcttgaactgcagaaactcctttctctgatacctgcggtcttatttaatttttacatcttaacagcaagagcatacccgtgatttgttttcacaaatgttagaaatactgtgtaagaatagacttatttttatattgtaaacttttactttttttttttttttgagactgagttttgctcttgttgcctaggctggagtgcaatggcaagatcttggctcactgcaacctccgcctcccgggttcaagcgattctcctgcctcattctctcaagtagctgggattataggcatgcaccaccatgcctggctaattttgtatttttagtagagacagggtttctccatgttggtcaggctggtcttgaactctcaacctcaggtgatctgcccgctttggcctcccaaagtgctgggattacaggcatgagccaccatgcctggcccaacttttacctttttaaagtatgtttttaaacaaccaataatatttggcataatttagtattttgccagtgcttcattgcttatgtgcaatgaggcatttaacaaaataaattggacatatatatttataattattttacctattccgtcagatagtacatttcttaaggagtaaggaaacttgaaatataactcactacttctcctttttttttttttttttcctgagacggagtcttgctctgtcacccaggctgaagtgcaatggcgcgatctcggcgcactgcaagctccgcctcccgggttcacgccattctcctgcctcagcctcctgagtagctgggactacaggcacctgcaaccacgcccggctaatattttgtattttttttagtaaagacggcgtttcaccgttttagccagaatgatctcgatctcctgacgtcgtgatccgcccgccttggcctcccaaagtgctgggattacaggcgtgagccaccgcgcccggcctgcttctccattttgttcacaaaatattttttcctcagaagtgtggcattgaatgatgtattgttttgtagtgagtacattatctcagtgaacacacaatttctttcagatagtcaccagagtagtcatcaaaaggaaaagcaatctaagtaccatttaatgggctgcactacactaatattctatttgatgaattaactgcatgtttttagttatctgttagactagttttcattcttttccttcccttcggtatgataaattcttttaaaatggttttattcaatcccaggaaactgaaaatacttgaaaaaataatattttgcaatttgtcagaaaatatttcctcactacttgactggtaatctcaagcatgattagtatagtgtttcctatgagctagaaggtttttggattagatgtgcaggaataggcattctgcctgcttttaaatgtctagctgcacagctgagcaaaaaagcccaacctggcagtcagaacaggctgcccaggggaactcctattgttcagccccattcaggcaaactataagatcacgcatagtgtccgagccggtgctggtgcctagtgagaacatggacagtccaggcatgggatgtgtggatatgctgccttcgcagtgatcaagaattcaggattttagagcccagtaaatagctcatgagaacttgggtttagaaaatctgaactgctgggccaccctgaagtatcttgaattgaggagcttgggtgaagaagtcctggtatcagttgggggcccttcagatgagctgccaccttgtgactgtccgtcagggtcatcttttggccatccctggttagcgttgccatgtgggtgacaactaggagactttacttgaatgttcccacagatgcatggctgggatggcgtaagttcttttctgtttctggcagcaatggctcaggattagggtttatgaggttaagattaacggagacaatagaagagaatcttgacttgataatatgttttttattttgtaaaagctttgttgcaatataattcatattccaagtaatgtacccattgaaattgtgcatttcagtggtatttagtgtatttatagagctgtacaaccatcaccaccctgtagctattatctccgcatccctacttctccctagctgctggaaaccttgggtctactttctgtttgccattctgagtatttcatataaatagaatcctacagtttatagtgctttaatgactgtcttttttcacttaggatcatgtgtttaaggtttgttcatgttgtagcttttgtggtactttcctttctcttcattgataaataatattccactgtgtggataggctacattttgtttgtccactcatcagtcgatgggcatttgggttgtttccatattttggctattccgaataatgctgctatgaacatttatgtgcaagtttttgtgtggttttattcctcttgagtagaactgctaggcctgttaatatgtttttagtcttttgtgtatatatgggaatattgtcacctagtatgaaatggtttttaaaggcaatcaacaatctaaaacctccagttatttgtgtgtttttttttttttttttttttggagacatgagacagggttttactgtgtcacccaggctagagtccaagtagtatgatctgggctcactacagccttgacctcctgggctcaagcgatcctcccacctctgcctactaagtagctgggaccacaggcacacaccaccacctctggctaattttcctattatttgtagatacagggtttcgccacattaccaaggctgctctccaactctgaggcttcagtgatttgcccaccttggcctcccaaagtgctagaattaagggcgtgagccaccatgcccagcctgcaatgtccttttctgaattcatagacttctcagtattacttagcagctagcctttttttttctttttttttttttttcttttcttttttttttttttttttttttgagagggagtcttactttgttacccaggctggagtgcagtgacacgatatcagctcactgcaacttctgcctctcgggttcatgagatcctcccacctcagcctcctgagtagctgggactataggtgcatgccaccacgcctggctaatttctgtatttttagtagagatgacgttatgccatttggccaggctggtcttgaattcctgacttcaagtgatctgcctgccttggcctcccaaagttctgggagtacaggtgtgagccatcgtgcccagcctaggcccccctgctgcctttaaaaaaaatttaataattcacattattgaaatatttaaacctagtcattctttcctttggctgtgacttcttagaaaattattattttttttaaatatatgaatgtggtgacttttgacactgtatttgggtgtttatttataatttatatgtatgaattttaagtaccctagaattgagtgtaatagtgatagtatttttaaaagtggaaatttttaaggtatagtatgttgcaaatttttaataaaagtttctattccatcgaagtgtaagccgtcatgatttgtttcatactttcttatgcttgtaattagagaaaatgtggcacatatacaccatggagtactatgcagccataaaaaatgagttcacgtcccttgcaaggacatagatgaagctggaaaccatcattctcagcaaactcacacaggaacagaaaaccaaaccctgcatgttctcactcataagtgggagttgaacaatgagaacacatggacacagggagaggaacatcacacactggggcctgtcagggggtggggggctaggggagggagagcattaggagaaatacctactaatgtagatgatgggttgataggcgcagcaaaccgccatgacatgtgtatacctatgtaacaatcctgcacgttctgcacatgtatcccaggacttaaagtataataaaaaaaaaatagttttaagctggtttctctaagaaagttttcctttgataatgaagataacaaagaagatagattttagcagcagaagtattcttttcctcatatttccagacattttaatacatatttgcagacattgtaatagtcatctttatagctcactccagtgctatacattgggattatagttgcttgcagtatagcatttacatcttccttattcttttttcttcgttcattctctctttcttgaactctcattctctctctcactggtcttgtgaaagaacatgattggatttctgctttgagctatctttaagtttgattacaaactgtaacagagtagccttgaggttttttttattggtaactattttgtgatgaggtggttgaaatcgtgcttctttcttgatttttgtttgtttgtttgtttgttttttgagacggagtcttcattgacacccagcctgaagtgcagtgatgtgatcttggctcactgcaacctctgctgcctgggctcaggaaatcctcctgcctcattctcccaagtagctgggaccacaggtgcatgccaccacacccggctagttttttgtatttttggtagagacagggtcttgccatgtggcccaggctgctcccaaactcctgagctcaagcaatctaactgcctcgtccctccaaagtgctgggattacaggcgtgagccactgcgcccagccaagtgcttcttgatttctatcatattgtgatgttcagaatctaatgtagttatgtggcccttacgttactctgccctgtactatcttctttattattttacattcatttatattatacttctaaattataaaataaaattatagtttaatataaactatatataaatctaatatagatttttacactatgaaataatgcacgtttcttgaaagagcaactatagtagtagatacatgttataacgtgcaacgtctcctgccctgggattcttcctaagtaccacacccagaataaccactgtttcttatacagctttccagaaaattttatgtatttttatacaagcacttgtattcacatacacgttgtttaaaaaaaaaaaaagaaatggtgtttttctgtacgtggcatatgtttcaacatcttgccttttcccctccaccctaatggacattgggtaatgatgtaactaatttctgcttttctgttagctttggcagccagggagctccaggctcatttacacttgctgggagccctgtgctcaattataattgcctacgatagcctccactttctgatttaatgttcttctttttctgaatttttaaaaaaatctttttaaaaagttttattatggcttctttacgtgagccttttaaacaacttgagtgaataggaggattcaggaattatggctcatagaagagacatatttaaccttatgcatcagacattgttagacactacgctgtatttgtatagcttcagtgtttggtagctctagatatcaagatagtatttaggaaattttcttttccaacatgttagttagttctgaaataccccaaatggttaatgtagtttataaactccgaaaagctttttatctaatgagagcactgttttaaaaaaaccactaatgattttctagttgaaacatttgaaacaattttgaagtacaggggacttttctttaaaacagtgctcattatactcggaagataagctcttgagcatctgtcatccttgttgatgtattcatactgtttttattctttgaaatgtatttaaatagaaaaaatagttcatgttttttgtcattctttcagactgcagtgttttgttttgaatgtggtgaaattggttttattcctcttgggactgcttatctctagggcctggatgcttcctttaaatagggattcacaggtagtaaatcattagaatttttgtttaacagtgaaagaagtcacttaacataggtctgtcatagttctgtctttgtcactgtatgtagaatttcatagtgatacaacatccattttcttagcaaaaagttaggtctagggtatatctgtttggaaaattacatcagaattgattttcaattaatcaaagttactaaatagtgctctgagttaccagtggtatttaaaattaattttggaagttgcacacatactttatgtgtattttctttttcttgtatgagagaatgatatatattaaattgtagttattgcttataatccttttagaaggcaatggggctactcaaggaggctgaggtgggaggatcgcttgaggccaggaattcaagaccagcatgagcaacataacgagaccccgatctctaagaaattttttaaaaaaagttagtcaggaatggctcatgcctgtagtcctagctacctgggtggctgaggtgggaggattgcccaggacttcaaggctgcagtgaactatgatcttgccactgcactccagcctaagggacagaatgagactttgtttctaaaaaataaaataaaataataaaaataaaagaaaaggaaggcaatgatgttctgcatcagtgacaacagcatgggcattgccaagatctttgatgaccttactgcttacctctccccagattttacataattttatcttcctgtcccattgtacactgacaatactctccttcaagtgtcctcacctcttgatttgtcatatactcttaattttattgctacatttggccatttttttcactttttttctttgttcactttcctttgctccatacttaactaattttccagatttctgtccttaaatctctttcattttcactggatatactcttcccaggcttcccaggcttctgtaacaatctatttgctttgtctccatcccataactctccctgagctctaaattattatatgcaactgctcactggacatacaagttcgtgattcaacagaccctttaaaactcaaatctgtttcccttagtatattcccttgtttgttaatcttgctcagttacccaagccagaaatttaggtatcattcttgaatacattgtttctcttcctttccacacccgatcaatcaaatacacagtcttattgcttcttactttttttttttcttatcttattgcttttattttcagtatttttttgaatcatgaagctgtataaacagacaaggtgatctgtgttgtgttagggctgtctgtgccatgttgctgtgggagtttctatatggaagaggggcattaacaaagctttgaaatgccaaagcagactttccagggaagagcgtctgcagataattctgaagaatgtgttgatagtatcttggccacagggccatgaggcattatcaggggcaggagagagggaggctattcccaggaaaggctccagcatgtgccagagatgatgcagacaacattaagatttgaaaaaatggcccagtgaacaaagtgtttttggttttgagagagagagagattgagagacagagagagagagagaaaccaagggatcatgatagttatagtcaaatagaggaaggattatcttttgaaaatgtgttggttctgtgatacaagaggaagctaagacatatcgtggaaacatctcccccctccaccttaatatcaagaacaaattgtggaatctaatgttaatgagaagtagttccccactgtgtcagatgcgcaaagagaaattggaatatacttatcaagtatattatagatggaattgaattattgtaaagagtagattagagaggaccgccaaagtccagtcccaaacatgatacattaagtgtatcccttagtataataccaaggaaccccaaaagctttacagtgtctaaactctattttacgtcttcctaaactgatatcgtacattcaatttatatatttctgtactaagatcatgaatttagagtttattgagaaattgccagaaaaaaatgtgttaagtttttatcccttaaagagtatctcataacttacagatttgagcagggaggtatataatcaggagtacagtttatgtttgtttattcaaagctctgatctcatgaaaattgctatataaatgcttgttttaacaactgttattattaggggtttgtatgaaagtctgccaacttggtcccaatatttatattataaattaaaatgttttgaaaagaactgcttctcaactgtgatcctcattgtttttgaaacctaaaatatactaatttttaatttttgtagttgaaatagtttttaatgccagcagtcttttggttatcagtttcatttgaagaccagaagttcctgaacaaagaatatttatttcagattaataagtaaataaagtgaaataaaagatttttttcctttgaaattgaggaagatcagttattagtagtacaaactgtgcactagattgtatcttagggttcctaactcattcttaccaatgataataactctgaacccaagaatatctgagacagttctcaattaatttaaaaagtttattttgccagggttaaggatgcacctatgacacagcctcaggaggtcctgaggacatgtacccaaggtagttggggtacagcctgcttttatacattttagggagacataatacatcaatcaatacatttaagatttacattggttcgatctggaagggtgggacaactcaaaatggagggacgggtgcttccaggtcataggtagatttgaaaattttctgattgcctattggttgaaagaattattcaatgtagaaaagaatgtctgggttacaataaggggttgtgaagactaaagttttatcctgctggggaagcctccaagtagcaggcttcagagagaacagattacagatgtttcatatcagacttaaagtctgtgttgatgttaatgctggaggggtgtaatgaggcatgttgaccccctcttccatcttggcctgaactagtttttcaggttaactctggaacgcccttggccaagaggattggtccattcagatggttaggggggcatgtagagttttattttgggtttacataacccattatggaaatgattccttggccctaaggtaattatagattctggatgccatgcttatattaagtagataccaaaatgctacttttagagtttgagtttctcttacgtttttagaaattcaattgagtagaactcgttattaaggaaaaaatactcaagacccgaataatattgccatgaataaagcggttgattagtgattggttgactttatgcttttcagttcacagaaatattgctgaggaatcttgacacaggcaatgcaagtgtttacatgaatatgaaattagcaactatatttagctataattaaaatctagtaaggtatgtaaaacctgtttgtctttgactagaacttattccaagttaatgagatctcaaacaaggcatagagtgtatgtccctttttgaaaagatgatgatattttcttaattactgtctgtgtttgggctggccaattttgacccagttaaaaagctgcaaaagcgtggtctgaacttctctttttattatggctaattttcctttaatttagactacttatacaaatacccagtattatgagccagcaaaattaacaggtgtggatttaatatgtagtgtgggtccacagagattatattcgttgtataaagcctaattttttgtcttagttgtccttgtcatgtttagatcttatttcaagccatttctttttcattttctgataatctgatttcattgtcaccttaatatcttctttttttgtgtttgcaatcttttgtttttctaactctaatcccaagaggcaaaagtaatacattttgagggatttttgagaagttttgtgcttgccttccccttgttcagataagttgtgctgcaaatggctccattcctcctgttttgtactagtgacaggaaagttcgtctagagataaaatgtcacaaatctgtccacctcctctactctctcaggggactctacaacgtcacgttttcttaactatttaatttgtaatgccttctttattttggggaaattacaaaatagtgacacagtctccccagcccaagaaggaggagattttttttccccagtagggcggttgttttattttgactatatagtcttccctagaattgggggaataaatattggtatggttttttaatattgatttccctgggtagattatatttctgactgtaaaatatattattggatgtgcttctcaaatagattttacataatcagagaaattttgaccatgagcctaatttaatacttttttgctccttctgagtttacataaactttttatttttccatggagtttatcagaatcccaaatcctctgcttcagtcttcctttcatcctgatcttcaggatatttttcctggagttattattgttattttatagtatctatatagctactattttatagtagtatctactattttataatagattgtcctggaaaacctaccggtgcatgagagaaaagttcaaggctaaacttaaaggtactgggtagtcaacagctcatgtctctatcagaaaatgatggagactagaaagtaacatacatgagtggttatcattttaaaactagagaaagagtcatggaagttggtaggggggactttaaaggtgaaagtttagattatggtctatcagagaggaatggaaaataatgtattttaaggagactgtaagtatccaaagtataagttaaggtttaaaatattacatttgagtaaaacaagaagaaaagagtttaacgttttcctgtaagagagtaggttgtattggatagtcatgttgttcagatttttatttattttgtaaatagttttgttttgttaaaaatttgtgttaattgggccgggcacggtggttcatgcctgtaatcccagcactttgggaggctgaggcgggcagatcacctgaggtcaggagttcaagaccagcccggccaacatggtgaaaccccatctctactaaaaatacaaaaattagccaggcatgggggcaggcacctgtaatcccagctacttgagaggctgaggcaggagaatcgcttgaacccgggcggtggaggttacaatgagcccagaccatgccattgcactccagcctggacaagagtgaaacaccatctcaaaaaaaaaaaaaaatttgttaattttgctgaggtggtcctgagactggatcaaaaattgcagcactatattcttctagaaacatgcacacgttttttaaaattgctttacctgcacaattgagttcatgatatttctgtcgtgtcgcatttgtaatgtagttaattattttcatcatcttcctgaaaaaggcaaaatcgatgggaaatttttcttcttaatattgaatcacgtatgactaatttatatttacttttgcaaagcagggaaatatatgaataagaggcatgaatccacaattgctgaagcaaatcaatacatgtgaaggaaaagcaaaaccctatgtaggcctatgtagaaaccttatgcacagaactaaatgcttgttaagtaaaaattcctaatccttatcctcttatgccattttaaattaactctaaaattagtattggaaaaatctccctgatttgttcaaatggctgatgcttacatgtcattttggatccagagatgcaaaatataagagcttcatacataggttcaatacttttctaaactgaattgggtttttgaataaaataccagggtattccaaatgaatgatttttatctgactcattaagaagtgaaaataaatattttattatacatgtaatatgatttagttttacaaactgttaatatcataataatctcaagaagttctaaaaatggagataattatgacagccataaaatataaagtatatggaattatatatttggctatatattagtcatatatttttagggcctactttatatttttttccctggcagtgttttagttacatttttccacagtgtttttctaaaaagaaattgtatcattttgtaattcttagtttgtcagagaaaccaactttatctcaacttcattaaagagtaataataaatttgaatttagttgatgtaagagttgccagtaccaaaatggagtggtttatgccaagcagtaataaaatggagccaggaggccatgaagtaagggagcacacacatgtatgcctatgatggaacttttcccaagaaattcctcagaaccatagtattccagataagctgcttgcacaaggaagtttgcctaacaagagctgccttcatcaatgagctaatgtggattcctgtaacaagctcctggaaccagtggtctttgtttcaaaacagttcatgtggactttttttctttcaaaagcttccccttgcttcagcctctttgcatgcacctgtggtgggccatagcaagcataacccgaattgcaatttcttgctattctcaataaactctttgttgtggagagttggtccctctattgtttattttaggttgagattagcatagaattttgtaaagtcctggaggtatatccatgccagggattaaattggattctattcccaagtaatttttgttcttaaggacactctaaggaattatttgtgtctgctttaattattaaaaataattttgtttattcagttcaatagaattgtatcttttaaaatacttatagtccttagatactgttttgttataaagtattttgttttgaagatgtctttaaattcactggcttcaaagataacttctgcattattccttgggctttcctcttagttcaatttagaaggaacagagaaaacacaaacatttaggtaaataatggaaataggattcacgtcataaaacgatactttgcaaaattgacaaggtggcaaacatacaggtgatgttagttttttgattaataacaagagacagaatctgaagggttagaggaaatgcataagaatctgaaaaaataaaaggatctggagaagacacccttaaaggtgatgatcaagaagtctgtgttgtataacggggctgttggggctcaaggagaacaaattttaaaagtggcaggaggtatggagaaagctgtgttggtgatgtgagtattatgggcttctcaaagcatggttctgactctggcaaaaagtgggaggtcagagcagagttggctgcttgtaatgggagtgggggagaaagcaactctttaaaaaaatttatgtcaaaatggtattcagtggtccatcacattgaatcaacacacctttattgaaaacatattatttagcacacactctaggggttcatttctcttattctctgaacttgaaatccttttcttgttgatctttcatatgggtcactaaacagattctattttacctgattaaataaatggtaacaaggcctaggtctactccttcgattttactgtatacttacttaacagttcactttgtcagacttctaccccctctacaagattaagaaaattagtggttacagtgtcatgcaattctattcggcttgaaaagttattgaggcatgtttttccacctttttaaccttcatttatttagtagaagcattcccttaagtgtatgatgagtcaacactggttttgcctgactccagtaaagtcaaagcattatttaatttaaaatgtgtgcatgttaagttcctttctttgcatttaattggagacttttttccacagttagctcaccaaaatgttactaggttcctctgtggctgtctactatttgaacagacaagcaactaattagaataacagaacaacatgactgtcattcctccattcttacaggttatttttaaaaagagattttgtttaaaaagagaaaatatgtattatattaaggaaatataagatccatactctccttgaggcattttttcacttcaccatgccaacattcctttattccctatcataataccgatcaagaaatgggaggttttcctaagtcaagaaaacctctcacacataaaaattcaaactgggaaagcaaatgtatcagggggcggcttttaatttgacaaaagatctgctacattacaaaagaatttttctaaagattactttatgtagacaactccctcagtgtaccgaaaatcaaagaatgttctacattttaaacacattttaaaatgggcacacctgttcctaatattcttatgtaaatggacctatttacatgtgagacccaatgtggtgggtaaatgaaaaccagtgtgtgagttactcaagtttgttaatgatgttagaaatatagtcaaaatagctcagtctgctcttgctatgctattttgtccagccaatctctcatcctcccttcatcctaattccagaagagaggataggagtaaaagcaaaatcttattacaaaaaacacactctggaaagaaagaaaactgtattggataatactcagtttggtatttgttttctcctgtctagttcttagtacccttagaattgagataattcattatttgtcactcaggtaggtttcgagtgaactgatatatttaattagatccttaaagcccataggatttatactggtcatttctgtcaattgtgaatctgctcatacttgttcttcatgaaactatggaataatttttcatgtattttcatgtgtcaatctgaaaagaaacttaggttctccagaacagaggagtttatttgaaaatagcagaggattataacccagaaaatgtgtgctgagccagatcacaggcgcatcaaggagactgggaccaaagggagacttttaaagacaaagagaagtcttcataaactgtttgttaaaccagaaagatcattggttacaagagcttgctgtaagagttggcgacaaatcattgttaaagacgtcattactagacagatgtccttgtgcaagctgcttatctggagctttgcggtctaggggaatttccttgctaaaagtcctgttacaggcaaatgtgcagtaaatgcgggaatgtctcctataaggcctttacaggcatttgtgagtgagggctcccccttcgtggccttccaactccatttgctagggtttgacataattgattccattttggtatcaacaactttcacacatggatagttcaaaatggaagctcctgtaaaataatactttcatatgtattttttcatggtgtctagtacctgtgccacatagtgaatgcctgaataaaggaccacatgtattacagttgttagattttcttagggaccctattgtttaaatgacttataataagcacttactgtgtgatggtaaacactatgctatttatgtcacctatacttcttacttaacattaacacaactctacacagtttggaatattgttgaaataatcactttatagctgagagtagagcatgtatgggttaaactcttgcccaaggtcagacagtgagttgacttgtgtcttcccatgttgtcactgatgcgtcttctcctttgctggctcttgttccctttattccttcagtaatatagagaaactacagcctttcattcccaatagagtgaaaatacaccactcattcattatttttcaattatagtgcaaggacgagcagtttaccctaatatccatttcttgtttggttgggaaattcaccaacagagcagaaaagcacagtggggagagacctcaggggaaacacatacaactttgagataaaccctgtttttgttttaatgttaaaatttaacttttaatccctttgtagtatttacacaactgtcagtgaaatgataaatcttctagctcatttcacaagagggcagcactttcttttaaaatttaaagtatgactaaaaaaatacaatcaaattaacgttttctatcatgaagttaagcttgaatgatttacaggaagatgggagcctctctgtcctgggggcaatttatgagttaagatgagtgcagatctgcagggtaacttgggatccttagaaaatggaacgatggattaaaatcaagccctagaatttttgacttgcagtttgaatttggagactattttggtaactttgtaaatgtgtaaaagtctgtcaagatcatgtctttcttttctattatggcaaaacatgaagagtgaatcattttaatatattcaaattgttttgctcatatcaaataaaaagtatttattgagcaatggttttatgtttaggattctataggtcatttgaggaacaaataaatttaacttttttcttcattatttaaagagcttaactcccttggggtgacaaggaagggaaagcacattggcaaaacaacctgtaaacaagccaaggcaacatgtaaataaggtacagggtaacagtacagcataatggagatggccgatttggatagggaattgttgaattagggttttaatgcagggctttgagtagaaggtggaaattgaattggtcctcagtgggtggataaaatttgaatagatttaaaaaaaacaaaacacgaggaggctattatttaagaaaatagaatcctgtcaacagagaaaaagtacaaagtgcatcagggcatgctaggaaagcctgttgtttagaacattgtaggaatgatgcctggtaggtaggataaggctgtattgtggcaccttgaaagttaggagtcagggctgcactctccaataccattgccgctggttgtatgtgactatttaaatttaaatgaattaaaatcaaaatcaaaatgtatttccccagtcacatcattagccacatttcagatgtttaatagccatcctattattgaacaacacaaagatggaatattttcattatcacagaaagttctattggacagcactgcatcacagtttagttatttgggggttggaatatggagaatcattaaagaaacagggaatgatacgacagtataaagaatgtttgaattttaaatctgtaagccgggaacttaaagggaacttctttttttttaatgttaagtgttttcgatggagcataaacagaacttgcaaggtataagcattttgtataagtgttctaaaaactgtcatatttattttttattttaaattagctactagtatactagctttaatgaggaaatagaaggtgagctaaaggaagtaactttttcattagttttcaaattcagttaggtttgtcatgcagcatacagaactggagaatacagagagactggattcaggaatgatgacgtgaagaaatcctgtgaggagatgtattagctcattctcatgctgctaataaagacagacatacctaagactgggtaatttatttaaaaaaaagaggtttaatggacttacagttccacatggctgtggaggcctcacaatcatggcagaaggcaaaggagaaacaaaggcacatcttacatggtggcaggcaagagagcttgtgcagaagaactcccctttataaaaccatcagatctcatcagacttattcactatcaggagaacagcatgggaaagacccaccttcatgatttaattacctcccaccaagtccctcccacaacacgtgggaattatgggagctacagttcaagttgacatttgggtgggacacagccaaaccatatcaggaggtggaagagaaaagaagcaagaaatatcaaaaaatattaagatattttgatatttaagtagtgtgtatatgtgggtgtattaattggtgattccaacttgttttaaagtttcaaagttgtttgagatgatatgtatgagataatttagtaattcaataacgacttttggttgtctactatatggtagagactgttgtaatttctggggatacgtcaatgaatacaatagagcattgctattttaggaatggcttcactgatgtgatgaatattttattattcaatctggcttttaataattactggtcataggccgggcgccgtggctcacgcctgtaaccctagcactttaggaggccaaggcgggcagatcacaaggtcaggagtttgagaccagcctgaccaacatggtgaaactctgtctctactaaaaatacgaaaattagccaggtgtggtggcacgagcctgtaatcccagctactcaggaggctgagacaggagaatcgcttgaacccaggagacggaggttgcagtgggcccagactgcgctactgcactccagcctgagcgacagagcaagactctgtctcaaataataataataataataataattactggtcattgataaatctttatgtaacctatttatattttattttaaaattttattgttaataataaccagtgttaactcataacaagttttctttgtggtaaaaaatgaagaaatattttaaaatatcatacacttagcttctctcaaaatattaggtttgtgcaaaagtaatcacggtttttgctgttaaaccaaccgaaataataatactataataatatatttttagagtttttatcaatttttttgatatatatgaaaactagtggaaccctcacctctgaaaaagtcaatgcaggcatttctggtatacatataataataagaaagtcttaattgtcctgtaactaaaactatctaaatctcaataaatttgtgttgaaacaaatgcgcaattatatagtactagtgaatgtctttcttgataagagtgtttgctcaagtgttagaggaatattctacacagaaaaatcaaggttcagacaagagttccagggtcaagcagctagataagtgtcataaaggaaatcatgacacaggtcgtttgatttcgagagtgttattctttcttttttatcccatgaaatatatactatagggccaggatgaaataatacagataagtaatctagtttacatgtaacatcaatgaatattttctcatacaattaaaacattttctgtattgcttttcagactatcatagtagtagaatgatctgactcaatttttagtgaggaagttatgttctgatgacttaagttcttatcatcctgaactacatatagtcttttctataccaatgtgtagtgttgtcagtttgcgtgttgtaaatatcttcttccagtttgtgtcttgcctttttattttctttacagtatttttttttatttcaataggtttttggggggcaagtggtgtttggttacatgaataagttctttagtggggatttctgaaattttggtgcacccatcacctgagcagtgtacactgtatccaatgtgtagtcttttatccctcacccccctcccacactttcccctgagtccccattgtgttgtacttttaaaggctcttttacttcctaattattccatattctgattttaaagttaaaacactctccagattaaattctagatggaaattgtactttaaattcctttgtttagcaatttcaaatgcagagcttgagatgacaagacattgcaaagtcccttctactgtggcttaacttatccctaaacaagaatgtggctgatgtcagtgtcagatggtgcttcacctgtggacgttcatttcctttaatattttgttacagtaaccttcatggcacataaagcctcctgtctctgaacctgacaaacagggtccagggaataagacttaatcactatcacaagaaaatcacgggaaagacctgccctcacgattaaactataattttctttttcacttctgcaacttagatccatgtacgaaggtgctattcacattgcagcatctctttagacactagtagactctggcgctttcactctgccacagtctaggtgggatcacttaaacctacttgaaagataaagcgatgcttcaattgcctggacaaatcaggccagacattcattttcaagcgttatcaatggatttttataaacattccaaaaaactttagaccgtagtatcacagtattagatgacaatagggatactcgtttccttgggaagagaatagctcgagttatataatgcctgtttagacacaaagttgtcctttaagtaagcaggagttactagttataaagtaacttatgacaacaaaaaggctttgttctgtctgtcccttagaaaagcttaccattgaccagcccactgctgcagaaagcttgtttctattgagggctggtttggtagtgttagaccatctggcacctcaaaacttctgaaacttttaaaggcaaaaataattgtctccagtagcattagctttcaaatataatgatgccaccctttttggaataggtatctactcaggaaggtaaatgtgttttacttgggtattttctatctaatgatttaattttgtatgaaaatagaaacacaggctgtggtgaaattttcacacagtataaaagattgaacattgaaatgtttcattctagacactcagctctccagtccctcccttccaggtcgccattattgctgtattatagatctttacagaaatattatctgtatctcatagattgtacctgtacataactacatatcactccccccctttttggcgtatacataggatatgtacgtgcatacatattagaggttaattatttgctcttagaaattatctccctcttggccaggcacggtggctcacgcctgtaatcctagcactttgggaggctgaggcaagtggatcacgaggtcaggagattgagaccatcctgtcaaatatggtgaaatcccatctctactaaaaaatacaaaaaattagccagatgtggtggcaggcgcctgtagtcccagctacttgggaggctgaggcaggagaatggtgtgaacccgggaggcagagcttgcagtgagcggagatcacgccactgcactccagcctgggcgacagagcgagactccatcttaaaaaaaaaaaaaaaagaaattatctctcttttccatagttgtacagcatttcattatgtgagtctgccataacttgtttacccagttaccttttcatggacatatagattgttttcagctcaataagtcaagtaggacttattgagcatccttgtacatatgtctgtacacatgtttgcaaattcctagtgatagaatttctgagtcaaaagttatatgcattttaacatttgatgggcattgttaaattatcccttaccctcaaatttggcagattctaataatctctaggaaatgtaatgacttaaagtaaaggaattcttcattttgtaatcagcctactgatttccatgaaaggtgcataatacattgtctgtgttcaccgtctatgtagaactcattgctcagagcaaacatctgaaggaagagagataacggtacagaaagtaaatatgactggaggggagaaaatgtgtgattgtggtgtgtgactttttgtgggaaaccatagttgtaagtgtgagtggttcatgtggttaagtattaactggttattggtgatattagtgaagatggatcatgattagggagttgaagtaggtttagagtgtgattttgcagagaatgcagaatgggttcctaagtaagaagatgacagggacatggttcagagttgaagcagtagctccacaatgaatggattagcctccaagcatgagagaaatcccactgcttagtattatacacaaaagtatagctgatcgcgtggggttagtttgaacttcctctgtgtttacccaatgttcagttccttaaatatgtattcagattatagtaacaatgccctcctggggaaagtaccagctttttacttgtgactgaaaacggcgctttcaattttgatttgttttgacattttagttgctgttattaaaatttgtattttaattttggcttcaatttactaaatctacatagctgaagaaaactggagaaacctttataaaaccttttgaaaacctttaagagcctttttcccagagccctgtggatttagttgcatatgctacaggcttgtgctgtcagtagacatctggaatttgaggcttggcctcctgagattgtttccctcttgtctgatgctgcatattttttaggaagaatatggtttggaagcattaacttgtcttggcattatttttagtcacctaataaagtgccgtctgaattgttaaatatttagaaggttgctgaaggctgactcctgcacctggttggctaattcagaagcaaatcagctggtatttctcttcctgaacccctaccccacccacccattttcctgaagaagaaaaagctctttgagcctctttgaatgtctattggaatcttttggttatgtgttatagaaaatatattaagtattgaatctttttcttatgaatcctaatttttatttctccatgaccacctgtaaaattatcaaagtagatggcattatactgaagagacaaacattaaaaataattctttgcgtacaaagcatagtgcctgaacttcctgggataaaaggagagttttccctttcatcaggggactcaggcctccatccttagattgaactttttgccctttagggctgtatattaccttaaatagctaccagctgacacactttgctgcaggctgatgttaacttgaaagtcgaaatgtatggactggtctctccctaatggaacttcagtggtagaagacaatgaattgaaaactcagatcacgattagggtcttgaagctattttatttttgaattctaaatcccaagttagaagggttatgaaaaggagaattgtgtatatttctttcacaagaaataagttggatctttctttgagtcagaatgggcttacaacaaataaacttttctccccatgccagaaactcctcattttagtaatgaataagccatgatgtagcgatttatgtgtaatcacctattgaccttccatatgcttcactttagaggctcctaagaagcttttcttcttttcttttctttttgttctttgtgttggccaatataaagagaaacctgttagaatttacatagaaaacatacttgatctttacagttttaaaaattgtctttagtgggaagggtgccttaagatccactataggagtaagatgtaaagttcttatttgagctgtaaagaatcttttattgccttaataaaattactaaataggtcatcttttaacaaattatatgaaatatagtttttaagtacaaaacatttgtaaattgtcctaccctttgaaagttgttggcaaagccatacctatagctctcttcattttggcattggaatgtggtttttattaagcagtttagatttagattttcttgagtccattgctgagttttcctgtgcttctctgtggttctggaactttttgctttctcatgaaactctatgtctatgtttgaaacatggtttatttagctagagattcctgggttattcagtgttgatctgatacagggattggtagtgtcaagcatattccacctactgaggattagtgaacaatttatttgcacattggcttaaattgggaaaatgtcaactacttcaaatgtcatcatctaatttattaagtctctctggtgatgtattgcttacactggaggcatctattttttgttttaataattacaggattacaggtgataatgtatcaaagaggtggttgataaaaaaggactgtagaaatgtaggtatattaccaagatgatattttgtgtactgactttaaactaagaaagtactctttgttttgagacaaagtctcactctggttgccccagctggagcgcagtggcacgatctcggctcactgcagcttcgaccttctgggctcaggtgattctcccacctcagcctcccaagtagctgggattatcgtcatgggccactacatctgggtaatggaaagtacactttatcttatagatatcaaacacaaattcatgatgaaatgtgctcacttttataaaagcaactcacatttacaagtcttttaatgtatcagttatcaaagagtgcaatacttttgagtaatatattagatatttagctatttgaatttcacagaatgactttggatatttacatgaataatctatttgactttaacacttaaaaaacaacatttttagttgctttcttgtgttttagtgagagtatagttaccctgtgattaaaattagttaagaatttaaaaaaaatctttcaaatgatcccatattcttttgatgatctgtttttgaatatggatccactgagttttgtactctttcttcgaaagaagctgccatcagctgggtgtagtggcttacgcctgtaatcccagcactttggaaggccgaggcaggtggatcacctgaggtcaggagttcgagaccagcctgacgaacatggagaaatcccgtctctactaaaaatacaaaattagccaggcgtggtggcgcatgcctctaatcccagctactcgggaggctgaggcaggagaatcgcttgaacttgggaggtggaggttgcgctgagctgagatcgcgccattgcactccagcctgggcaacaagagcgaaactccatctcaaaaaaaaaaaaaaaaaaaaaaagaggctgacatcatagctagatttgtcaatatcttagtttttgttgctgcataactgtatataagggagttttcggtaagtgtcatcgtttctaccttagcagaggatgtcagttctgagaaggtagctgatacaaaggcaacagtttctggatattctactctcgaattccacaggagaacatactcttgttcctttctcctgtccaggactcaggtacttatcaggctgataaaagttcccatgctcttatcttttgggaagaaggcctaatacaaaggataccctttcttttccctcatctttatgccttgtgtttaaccttgggtgtggatacaagatatgtgggactctaacaataacatatcattcttgtcttgttataagagccctttaaacagaaagggtctactttagagaaagactatggtattccctgttgttccacggagtttttgtttaattcacccttctgatctgtgcatgggggaatggaatggcgtgtttgcacatgtccctgatcccagccatccagcaccctgggtggtagctggaagtttgcccagctgagaaagattgttctttttctctcccttttttatttatttatttttttgtgtgtgtggtggtggtgatggtgctggtgctggtggtttcttttgtcttgtatttatgtaaaaagtttatttgctgctcttgaaagatctcagcatgtggccccagagtctttacagaccaggttccctgtggccactttctctgtaagtttcttcaccacagttctgatggttggtcttcatgctgatgtcagtgctgttttgatccaaactgtagattatttttacctgtgaatttctgaataagcattagattaacacatttgtttttgaaatcaaatgtgcgttgaggtgaaacacgttctgctagaaagctcataaagccattttgcccctggggacatacaggtttttatgaaaaaataatgaaaatattttaaaagcttgttaaaatttgtatagatgggcatatgtaaaacacatgctatttaaatactgatatgaaaataagttaggaatgaaatagaaagaaaaatgatttgcaaatccaaaaaataataccaacattgtatactgttccctgatagatttttagtttttctggttttaaatggaatctcttacgacccatgattaaataagtgctaacggtattgatatttaagcaactcattagccctttaggagatgcatattctgattttaggggttcccccccccactttggtctatgccctgatgcaaaaaaagtaaacttacttatattaaaatttacattattctacttgtggtagtgtcaccattataagcactgcatctttatgatgaaactctgcctacaactagagaaacatgtttcaaatggacatttctgttatactttattggtatactgtatagctatgtaatgcaaaagcaaaatcacatttgccttggaatgatatccataatatcactacaaagaatttataatttggattggagtttttttctttaaagcgatgacacttaaaacttcctggaagatggtgtttctctgagtgccagtagtaatttaacatcaaaatggaagacacattcaatgtagttattactcacattttgagtacagtagtttctctcattaagttttatgtcagaaacaagtaaattccctataagaaaacagtctgaatgactttcagcggcatcaaagagatcgaaacactttaaaactattttcttcatcagttgcctgctaacacctttttgaaaaataaaattaatcaacgcgtatttccttttgtgatttgtattgttttgtacattcactcccttttcttttcatgggttggctcccaactggaacatggaacctgtgatccattcaagattgagacaatgtaaaagatagagaactgacttttggggcaggcaggcctccaggaagtgggagtgagctttcacttcaaactgggtgaggggtggtggaaagggaggatgctgattaaaataataaacaactgctggaaagagaagttgattaccacactgctgtcagatcagccaggggagctgccagagcccactgaggctgctctcccctgccacaaagccggcagaagggactagatttgctgcgagagcttttctctggacagacagaacaccttttaaaacaagtttagttctgttgcattgacagcatcccttaggccaggctgacctagggaaatggactgaaactagcttggtggttaccatagcaacccaggctgctggtgtctgggagagtgagaaccggtggcctcttgtcctgtgttttggtgtttcttcagctaagagtacactcctccttcgaactctacataagtcatgctctttgaaaactggctctttacccaggattttttttttttcgttctgaaatcggtctgaatggaggaagttggtaatacttggctttttttttttcttctctcatgcaagtttccaggatatagcttctttttttgctgtatgtaattgagaccaaactctaagcttggggccctggagagaacagttgtggcctgcaggtcattagtgaggtgagcagaagggaatcctggacttcccagagaaagaggagaccatgccagcctcgtggaacacagctaccaggaaatacagaagcaggtctattccttgcgaactccgaagtccatgaaaaaacggacccacagtggggtggctaaaatgtcccagcgcaagctgccgctgctgctgatggaccatagctcaagggcaaggcttgtaaaggattttacaaaggattttaaagtatagccagaaaagatacggtgtttagaagttaaacgctgttgtctgaaggaagtttgccggaaagatgtaggcttcaagggctactggacaatgattggtctgaacttcaacttacgggaactgctgacaaaatttgaaaaggtatgcagaaagcaaacttcatgaatgtacttttttcctttctttcttgccttttttttcactatacatttagatagatgctctattgactctttggtggtttagtataatttataaggaatattcaattttgctgtctcctttaaagatgtttttcaagtaaagggctaattagcaattacttcctttggtcaggagggcttctcatgatgcctgtcacttttagaattccacatcagaagaaactctttgtactcaagtcagctggtaatttaactgaaacttctttggagaaaaaaaaaagaaaatgaaaataaaataaaaatccagcaaaaaacactgggtattggtgccaaagtctgacttcgtaggcatgggttctgttctccatacccctcaggtttatctgtccagccactgcctgccgtgcactgccctgtacagccctctgcctggggactcagctgtgggtggcagaagtcgcttcacagtgacagtggcacatctgacctcaggctttttatctgagcgtgtctgttttaaacatggagtgcttgcatgcactgtgaagctttaatgcttggattattaaatgtgcgtgtagctcttttttccataggaaggctcctggcacaatctagatggagtctagcctgccaaatactaccttacatttatagttaaaacagaaaacctccacatgcgtgtatgcgctcctgccctctttagcctttggatgccaaacaccaatcttcttccaatttccagtctttaaagaaaaagaaaggcagaaaggggtgaagtcctccctcacttggtatgtaagtcaattattaatatttaaaaagctgtgctcagtggctttcaccgtgaatgccccatggatcattgcaagtacaaatactgtagaagcgggactggattgagtcattaaaagaataatgggctttttcttacaaaccacaattgccagagggaaaagatgcaacatcatgccatctgaaaagtttggaagcttttccaaaacaattgcagtcactgcttgccttttgatgataggaacgttatggtgggatgaatgtggagagagaagaatttagctctttgctccctcctggctgcagttgcttctcccaatctctctctgcacctctactgtaatgtaaggattaggcttgtaacacagggcggacttcgacctctcgctttaatatgtggttaagcatctaaattcctgagagtaaaagacggttctccctcagcttgctctccacttagaaggggcggggaaggcaaggaatatcttccttatggcagctggtaacagcaggtgacaaactttatgaccataaagaggtctgttagcttgttttgtatagatttgtctgtttcttcctttaaaggtatagagcatatgttacatgaataattcattacttagaccccctgagaggcagtaattgtgggcaatagctggacttttgtattgtaattgctgctattagtcttaaaagtctaggtcagataccaggggttcctaacctgcctcagcttcaagccattttattggcagagttagaagttctggttatattagcatgtttccccttttaactcccatgtcttagtatttgtcttattcctattttagtagttgaattgacagtagaagatatctactggctttttcctgtcaaaggcttgatttgggatttttattattattattatctatttatttatttatttatttttgagacaaaaggcgaactcaaagaaacagtcctgatgtaattctcagtctgaagttctccatatatgtgtatttttgtgttaggcagttttataaaaacctatgtgaaagttgatctctttggccgtattttacttctaggaagttgtcgtacatgaatgtattctttccaaagtgttaataaaatcctttgcgtattcttacaaaatctgtctcatatattgagatgttgcttcattggtttattggcaggaaaactggaattacggaaaagtatcagtacctcacacgtctcaaatacaactaaccaccttcccccaacaaagcaataatgccatttctagggaaagaccaaggcctactgctataatgcagaagccacaggatcccttcagaagctgagtaacagccattctacacgcagaggtagagtccctttaccctcaattctcagtcctgtctcttcctcagtattagtaacctgtttctagagagaatactagccttaacgatttaccacttttcatatcagcagttgtcattgttcagtctgaagtttaggtgaccacagtagaaaggggattttgctgtattcctgaaggaatttcaggctttaagaaaacgagggtccactgttggactagtagactcaaatcctgatacgcttagtagttgaggccaacagctgagcagcaggccttccaatggtggctaatctggaaagttatagactggtcagatcattaaaattcccaggtgaaagcagaccttcagcataactttaagacagcagtttttttgtgaaggtaaattgaaagggatattttagttgatatttttgaattttggagacatccagtggttttgtgatttttactggatataagaatgtttggcatgttatactcatataagaatgtttggcatgtggttgagcaccttgtctcagcatgtgtgatgctgggattgtagtttcccagcacaggcaggatgggcaatttcttacattgggtactgatttctagtcttctagaaccagaaagggcaaggctaggagtctcttgcaggcaggaagtattatgttcctacaagatgacagctcattacagattaggaaggcccaattggagggaaccatgccaactcgagtggtacctaaagaggaagaacttcttaccaggggaggatgaccccataccaagatgtgcctgccagcaagcaggtcctaatcatctaacaaagtgataagggatgagaagttgtggccatgggctcaagggtgactatgggaagagttcacattcaaagttgactagtccaccaacacacctctctgagatccagccaataggtagttttatttgccacgctgattttaattaatttttttccctgaaagtacttcctaaaggaagtatctcatgactttagggactattaacatactgtcatacttaagccatttgcattgtgtactgtatttcttttgtttaatagtcacagaggatagtgtaatggccaattttagctcagtgacattttgagtgactgctgccttttattaatttattcagacctgctactgaatggttaatgataatcgtagttctctaagggattttttgatgtatgtgtctgctgtgtgtgtgagtgccgttctcttagtaccattctcttggtgactccttgggcaaagatgcttcctatcataacaacacagagagaaaccactcaatgctgaattactttatggcatttacctcctttcacatgactctatcttttataattacaatttgaagctatattgtattgctcagtttgccatatctcattttaaaacaaatgtgtcctcaataagatatagtaaacacatttcaaagtctcctcatttattccctacttagcaaatatttgtgaagtatgtaccaggtgctagtctaagtgtatagatggagaagacattgatcttatggccgaatgggaggatacagacaaggacattttcaatgacaactgcataattaagcaaaagtagatgaaattataagagtaatgatagccctaatctcagtacttgtgaagtctctcctggagaaattacatttaaactgagacttaacagatgagtttaagttgaaagaaggaaatgagattatataccaatgtgtgtgcatgtgtgtggcccatgggtggacttgtgtcaggggaagaaattgggagctttcagggtaacagggactgctttgacatgggtcagaagttgagaagctgtgtgccccaggcttgtagttttaaacatttgaaatgcgataatttttctctgggttttctgacctgttcagttttgattacacgatctgatttgtttgttcagttttcatcacactatctgagtttgttccacttagtaatttgactgttttctactctgttgtcttactttttttttttttttggagacatggacttgctgtgttgctcaggctgaccttgaactcctgggctcaagctatccacccacctcgagtcttacctatatttatcatcacagataataggaaaagaacattattagcatcgatttcttaattcagaaatgctgctgtagacctgatgataccacctctattgtcagtcaaaaatgtgattcaatagagtgattaaaatctgtgagattagctgttggaagaaaatttatagaataataattaaaatcaataaattaattgaataattaatgacaattactatcccagaaacctcacaaactgtttcaaaacatatttacatatgacataacctttgaagatgatgttatttgcctattctattattatttaagtaatatatatatatatttttaaaatcatgattcctcattttcaaaacctaaagctctggcagtaatcctgctgagctcctgataataattctgaaatctagtctgacttttgaaaggaatggtggatttattttcctctaatgattaactttgtttagttaggctgagctttgggacatgatagcgaaattgttctaacctcatttcttcttcaccttcaggaaaggggtcagaactccttcagaaaaaaacatcactgttgccacataaggttaagtaaatagttggtgcaaaaataaaccaaaattattttaacaagaccaaagaggatgaatctagtctagcacccatttagttgttgaagacttcctggtggtactgttctaaatctctgtttcctgtcagagatttcagacagttctgtttattataatgtgaggaaatatttttgcttacatatttaagcaaaatatgttttattttcatgatgttttattgatttgttttataatgtatatcacataatttgtttataatgttttataatcaagctactacttgtagctttataatcaagtagtagcttgactgtgaaacattataaacaagttatttgatatacattataaagtgtttacagttatatctctatgggttatatcattagagaaatgcccagttaagggcaaaacttgtagtcaaatactaattattaaataagtaaaaagtaaataaataaatgttttcccgtatttgtgaagtttatcttgatctgaatagtgggtgttgtttacagaaagactaaccacttatcagtgaacctcagtgagcttttgtagccatcttctggagggctgttctgagggtttgcatcttatgcttttgatggtgttttatttagagaaaagtgtgtagtcctatttttctaactcctggcttttcttaaccttctacattatacttacattgttttaaaatacttttcaagtgaatccttaggacattgcttctgccctgttttcaaatgttagttcaactgcttgaatatcttgccatggcccctctgtgcacatgactggcttatgttaaatgcttggaagagcattgctttgtgcttcaagatggattacattcccataactaattatcagtaaccattttgtgctgtttaaagttcagaagggcttgcaggtgacagaggtaagcatcagtagggccaagtctcccagctgtgcagtgagagccagccctctttcatggaactttaatttattgtagcatttgacgccacatcagggtcatgatctgacagcctcccatgctgacatcctgagtttcaaatcagtgcatcattgcatagtgatctacgaagaaacatgattcattaactgcatttatttctaaattttcagtgcaagcttagccaggactttgcagtgcaggcttctaaattattttaagttcccccattaaacttttcaagtgaagaaattgcacaaaatgattactacatttccttccaatttttcaattgtttggttttctcctagcactatagtggccaatttgccagtcaatcaaaataaacctattaatccactcatacattgatatgtgtatctatgtgtcatctatctactctgtttacattaggatccttctatgtaacagagactgtgaggatacagaagaaatattaagatgattttctgttttgaggcactctgggtatatttggcaaagttaatatgccaccaaatgtcaaataaaacaaaataatgtctgtggatttccttttctttgatcacttgtggtttgattttcttcccaacttttgatgatgatcatgtgtggaagggttttccacatactgaaaattatattccaacatgaacatatgatcactggtagcacagttaaagaaaggtttgtggaactgcttatcatccttggttgggccagctatgcagtcctgtttcattcccattcgtcgtggtagctgggttggaaaacacatcgcctgatctgatgtgagaaggcgaattttctttatgttcttggaacccaaatgtcctgatgttgcgtatgctcttgtgaaacttagaaaactatgcatcttaatgcaccactactacttcttcttcctcttcttcctcctcctcctcctcctcctccttctacttcttcttcttcttcttttagaagaaatccccctctgtcatccaggctggagtgcagtggcaccatctcagctcactgcagcctttgcctccagggctcaagtgattctcctgcctcagcctcccgagtagctgggattacagacatgcaccaccacacccagctaatttttttctatttttatgagagatgggattttcatcctgttggctaggctgatctggaactcctgacctcaggtgaccaacctgcctcagcctcccaaagttctgggattccaggcttgagccactgtgcccggccttttactttttgcttctcttcaatgtgaaaggaatcaaataggtcaaaccacatcaggatgttgtagtttgaagttgtcttgtgattttaggtgtggttcatcgataatgatgtataggaacttaaacaggaaatttgaagccaggttctccttggcaatagagagcaaagaggtgccttgcttgtcgtgtcattgagcttcctgagaaagatggctaccttacagatatatagcgtaagcataaaatcattgcaaaacactatctgcacacctttaaatatgtctctttagaggtcttaaaatgcacttcaggacacaaaaatagaacagttgtatcaggagatgacaccaaagaacttttcagcggaacttccctttttctttttttcactgagaatttctatttggcacatctcaaactatgattataatgagactgcaattttctacacataatgttgcacagcctgagaaccttgaatcattatctggctctgtttcccagctgccctattcacttctcttctgcactgctctgggatagaactgccagtgaaatgcaaaagattcaacaatctcagagtttttattcagcggttaggcctaattctgcaaactgcaaaccacactttgcattggaccagatttggttttgtcatttgggtcagataacctcagagatcaatgggtttgcaaatttggaccataaatcttgcaggagctgtctattaaactttgtgttcatctcacccagtctctaaatctgaccctattagtgtcatgttagacatctcaaatcccatcagaaataatactaggtcagtgctgccaattcacctcatgtaactgacatcttcctaacatgctgattggagtagtgaggtgcaaaaggcccttccttgggtgtttctggttagtggaggtctatgggtgattgaaaaacaagcacttagatgctggtccctaagcctggattcttggtagaatgcatgggtgtgcttactaggagtgaattttaaataaagaaaagcattctgagtatttaaagtattcctatgtaaattttcaccctgcttatttatttataacaagagaaacttacaatgagtgaggctgtcttagtcagtttgggctgttataacaaaatgccatagactgagtagcttataaaccacagaaatgtatttctctcagatctggggactgggaagtccaagatcatggcactggcagattcgatattctagtgagggcctactttctggttcataggtgttaccttctaggtgggtcttcacctgatggcaagggcagggcagctctctggggcttcctttataggggtagtaatctcgttcatgagagctccacccatgaccttatcacctcccaaaggccccacctcctaataccattattgtcagggttaggggttcaaaaaaaagaattttgggaggacacaaatattcagactatagcagagtcttataaagaaaagcttcagagtagaaggacaatagaactatggtgtttaggagtttgctctcctttactaattcagattcattgcctgaaatgcaagttttttatttctgcagtgagctgttttactgttcattaccaatgatagccatggagactcacaccacatcttcatacccagctctggtccctgcttttctgtttgtaattcacacttacttatgatacattactggctgtcatgccagagttagctacaattaggttgcttccattaaattcaggaggaaaagataattgccaaactaatatggatagttatgctgacaattttataagggaaaagtaggaaaaaaattggatagacactctatatcttaaatttgttagatttatctaataaaaagaaactttgagtttaactttttgaaaactcagagaagtatagagatgaaaactaaacttatctgtaatcctcttctatagaggttacactatttttgtttatttttgtagtcctattgtgtatgtgtcaaattatacacaaatgcatatgccaattaaagtatgtacttttaaaaatgaaattatcataatatatagttttatatcctgttgttaaaaatattatatcaccactaatatattatgatagcttccactcttttactctaaaaacaatcagtgtgttaaaacatttttatacataagtcttcttaagttagataattttaacatttttatggctttttaaaattgcagtagttttggggggaacaggtgatgtttggttacatccataaattctttagtgatgatttctgagattttggtgcacccatcacccaagcagtgtacactgaacctaatgtgtagtcttttatccctcaccccacctcccacccttcccctggagctcccagagtccattataccattcttatgaccttctgtcatcatagctcagctcccacttataagtgagaacatacgatgtttgattttccattcctgacttacttcacttagaataatggtctccaactctatccaggtttctgtgaacgccattatttcattcctttttatgcctgagtagtattgtagtattccatggtgtgtgtgtgtgtgtgtgtgtgtgtgtgtgtgtatacatatatgtttacattttctttatccacttgttgactgattggtatttgtactggttccatatttttgcaattgcaaatggtgctgctataaacattcctgtgtacatgtctttttcatataatgacttcttttcttctgggaagatacccaagtatggaattgatggatcaaatggtagttctatttttagttctttaaggactctccatactgtttttcatagtggttgtactagtttatgctcccatgagcagcgtaaaacttccctttttaccacatccacaccaacatctatttttttttattttttaattatggccattcttgcaggagtaagggggtatcacattgtggttttgatttgcatttccctgataattagtgatgttgagcattttttcatgtgtttgttggccatttgtgtatcttcttttgggaattgtctattcatgtccttaatcaagtttttgatgggattatttgtttttattcttgctgatttgtttgagttccttgtggattctggatgttagtcctttgctggatgcatagtttgtgaatatttttcccactctgtgactctatgggctgtccatttcctcttctgattgtttcttttgctgtgtagaagctttttcatttaattaagtcccgtctatttataattgtttttgttgcatttgcttttgggttcttggtcatgaagtctttgcctaagccaatatctagaagagtttttctgatgttatcttctagaatttttatggtttcagatcttagatttaagtctttgatccatcttgaattgatttttgtataaggtgagagatgaggatccaatttcattcttctacatgtggcttaccaattatcccagcaccatttgttgaatagagtaactttccccactttatgcttgtgtttgctttgtcgaaaatcagttgtctgtatgtatttggctttatttctgggctctctagtctgatccattagtctgtgtgcctgtttttataccagtaccatgctcttttggtaactatagccttgtagtatagtttgaagtcagctaatgggatgcctccagatttctcccttttgtttagtcttgctttggctatgtggggtcctttttgcttccatatgaattttagagttttttttttttctagttctatgaagaatgatgatagtattttgatgggaatcatgtagaatttatagattgtttttgacagtatagtcattttcacaatatttattctactcatacatgagcatgggatgtgcttccatttgtttgtgttgtctgtgatttctttcagcagcattttatagttttgcttgtagggatcttttacctccttggttaggtataatcctaagtattttattttttttacagctattttaaaaggggttgaattcttgatttgttctcggcttggtcactgttggtgtatagctgtgctactgatttgtgtacattcattttgtattctgaaactttactgaatttatttatcagatctgggagctttttggttgagtctttagggttttttaggtatacaatcatgtcatcagctaacagtttgacttcctttttacagctaacagtttgacttcctttttacagatttggatgtcctttatttctttctcttgtctgattgcactgtctaggacttccagtgctatgttgaatagaagtgatgaaagtggacatccttgtcttgttccatttctcagggggaatgcttttaacttttccccattaagtataatgttggctgtgaattcatcataggtggcttttattaccttaaggaatgtctcgtctatgccaattttgctgagggttttaatcataaagggatgctggattttgttaattgctttttctgtggctattgagatgaccatgtgattttttgtttttaattctattatgtgttgtatcacatttattgacttgcagatgttaaaccatccctgcatccctggtatgaaacccgtttgatcatgatggataatcttttttatacgctgtttgattcagttagctagtatgtttttgaggatttttgcatctgtgtttatcagtgatattggtctgtagttttcttttttgttatgtccttttctggttttggtatcagggtgatactggcttcgtagaatgatttagggaggatttcctctttctctgtcttgtggaatagtgtcaataggattggtaccagttcttctttgaatgtctgatagaattcggctgtgaatccatctggtgtggactttttttttttggtagctttttaattaccatttcaatcttgctgcttgttactagtctattccgagtttctctttcttcctggtttaatttagaagggttgtatatttccaggaatttatccatctcctctgtgttttctagcttatgtgtgtaaaggtgttcacattgttcatggtagccttgaatcatcttttgtatttctgtagtatcagttgtagtatcacccatttcatttctaattgagctcatttatatcctctctcttcttttcttggttaatcatgttaatggtctatcagttttatttatcttttcaaagaaccagctctttgtttcacttactttttgtgttttttgtttgtttgtttcactttcatttagtcctgctctgatctttgttatttcttttcttctgctggatttgggtttggcttgttcttgtttctctagttccttgaggtgtgacctttccttgtctgtttgtgctctttcagactttttggtgtagacatttaatgctgtatactttcctcttagcactgcttttgctatatcccagaggttttgataggttgtgtcactattattgttcagttcaaataattttttaatttccatcttgatatctttgttaactgaaagatcattcaggagcagattatttaatttccatgtatttgtttacttttgaaggttccttttggaattaattcacaattttattccattgtggtcttctgagagagcacttgatataattttgattttcttaaatttattgaggattgttttatggcctatcatatggtctatcttgaagaatgttccatgtgctgatgaaaagaatgtatattctgcagttgttgggtagactgttctgcaaatatctgttaagcccatttgttctagggtatagtttaagttcattgtttctttgttgactttctgtcttgatgacccctctagtgctgtcagtggaatattgaagtcccctacaattattgtgttgccatctgtcccatttcttaggtctagtagtaattattttataaatttgggagctcctatgttaggtgtatggactaatccttttatcattatataatatcctttcttgtctctttagtttttgctttaaagtctgttttgtctgatataagaatagctactcctgcttgcttttggtttccatttgcatgtaatatctttttgtaatcctttactttgaatttttatgagtccttatgtgttaggtgagtctcttgaagacagcagatacttggttgttggatttttattcattctgccattctgtatcttttaagtggagcatttaggctatttacattcaatgttagtattgagatgtgaggtactattctattccttatgctggttgctgcctgaatacccttttttaaaaaattgtgttgttgttttataggttctgtgagatttatgatttaaggagattatattttggtgtatttcaagtcgtttttcaagatttggagcaccttttatgatttctcgtagtgctgatttggtagtggtgaattctctcagcatttattcatctgaaaaagactttatctcggcttaatttatgaagcttagtttcactggatgcaaaattcttggctgatagttattttgtttagggaggctaacaataagaccccaatcccttctggcttgcagagtttctgctgataaatctgctgttaatcttataggatttcccttgtaggttacctgatgcttttgcctcacagctcttaagattcttttcttcattttggttttagataacctgatgactgtatgcctaggtgatgatctttttgtgacgaatttccaaggtgttctttcagcttcttgtatttggatgtctagatttttagcaaaaccatggaagttttcattgatttttttttttcaaataaattttccaaacttttagatttctcttcttcctcaggaacatgaattattcttagatttggttgtttaacataatcctaaatttcttggaggctgttttttttttaattattttttatttgtctttgtcagattgggttagttggaaagccttgtctttgagctctaaagttttttttttctacttgctcaattctcttgaaactttccagtgtattttgcatttctctgagtgtgtctttcatttccagaagttgtgattgtcttttatttatgatatctatttctctaaagactttttcatccgtaacctgtgttgtttttttaatttctttttttgagatgaggtctccctctgtcacccaggctggtgtgtagtggtgtgaccttggcccactgcaacctctgcctcccaggctcaagcagtcttcccacttcagtctcccaagtagctgggaccacaggtgtattccaccatttccagctaatttttttgtattttgggtagagatggggtttcaccatgttgcccaggcaggtctcaaactcctgagttcaagtgaccctcctgccttggcctcccaaagtactgggattactggcatgagccaccacacctggccatgtttaaaatttctttaaggtagtttttacctttctctggtgcctccttgagtagcttaataatcagccttctgaattatttatctggcaattcagatatttcttgttggtttggattggatccattgctggaaaggtaatgtgatcttttgagtgtgttatagaacattattttttcatattaccagaactgcttttttagttccccttctcatttgaataaactgtttcattggaaagatctggaactcacgggctactgttcagattcttttgccccataagatgatcacttgatgtagtggtctcccccttcccctagggatggggcttcctgagaaccagactgcagtgatggttgtgctcttctgcgtctagccacccagcagggctaccgggctccaatctgatcctagggaatgtctgcaaagagtcctgtaatgtgatctgtcctcaggtctcccagccatggatagtagcacctgctccagtggaggctgcaggggagtgaagtggactctgtgggaatccttggttgtagtttggtttagtgctctggttttctcgaatgccagttatgctagcagtgaagttgtcatgtgaacagactcaggacttgtggttaagctgatgtgtggtaagcagtggaattagctgttgttttctccttctttggagcagggttgttctgttatgagttgctgtcataacttgagttggttggcctctagccaggaggtggtgctttcaagagagcaccagctgcagtagtagaaggatggtataatgttgccctatgttggccaggatgagtactcaggtcatctcaggtgatgggtaaggctgtaaaactcccaagagcttatgctgtcttgtggcatttgcagtggcaagttgcttccttgaaagggtctgtgaattcttttggttttcctggtatgttcctgcagtggttcttggagcgaaagttcacggtgtgagtctccagacgctgttctgtctgcctaagcaggagctgtgcattagacctgtctcctatctgccattttcctcaaaagaattttaagtctatggcttttgatatagattgccaaatgtttccccaaaatctgaaccaattttaaaaaaatttataataattctaattttacttaaactgcccccaaatgtattttataaagataaactatttttctttttttttggctttttcatttaatactagatataaataaattattgaaatttcccagataatgcatgcaattgttttggataaatcagtgggataatattttcttttatatttagttatcaaaatagattaagggcaagtaaagttagggagactgactttctttgtactttctttatacttagccagaaatttttctgttacagaagaattagattgttatttacatgccaaatatatgtttttcgtgcttattcccaagaatgatctttcacatcaataataaaataattaggttgataaatttaagaaccattttaaatcagataacttcacttaaatatgtgcataaaggctagatcttgtcaaaatttccctctcccctctttctctgtttttgtgtgtgcataagcctgaatatatcagttattctatgcttttggaagtatttttgctgacacgttaaaagtttgttttttttttaattatactttaagttctgggatacatatgcaaaatgtgcaggtttgttacataggtatacatgtgccatgttggtttgttgcacccattaacccgtcatctacattaggtatttctcctaatgctatcccttccctagcccctcaccccacaacaggccccggtgtgtgatgaaaccgttgttactagtttttatttcttaaagatgatgaacttgtatataaaaatattcttttaacattttagaaataaattttataagactgaaaggacaaactattagtaaatgtttcaaaatgtgaaaaacactttagttatagttatgtaatatcttagtgacctctgtaagatgtaatattttaagggaagttttacctatgtgaaaacgggagagtaagagtctgttggatattaggcaaagttcagtgatttggcaacaacagttgtataagatttcaaaaattgctaattgaatctgatataccaacatctaactagctggtacatgaactatagattacaatacattttttaaaaaaattgaggagtcagtgtattgaacaccttttaaaaaatttcaatttaagttctgggatacatgtgctgaacgtgcaggtttgttccataggtgtacatgtgacatggtggtttgctgcacctatcaacccatcatctaggttttaatccctgcatacattaggtatttgtcctaatgctctccctttcctttcgccctaccccccgacatcccccggtgtgtgatgtccccttccctgtgtccatgtgttctcatttttcagctcccacttatgagtgagaacatgcggtgtttggttttctgttcctgtgttagttgctgaggatgatggtttccagcttcatccatgtccctgcaaaggacatgaactcattcttttttatggctgtatagtattccatggtgtatatgtgccacatttgctttatccagtctatcattgatgggcatttgggttggtttcaagtctttgttactgtaaatagtgctgcagtaaacatacatgtgcatttgtctgtatggtagaatgatttataatcctttgggtatatacccagtaatgggattctgggtcaaatggtatttttggttctatatccttgaggaatcgccacactgtcttccacaatggttgtactaatttacactcctaccaacagtgtaaaagcattccaatttcaccacatcctcgccagcacctgttgtgtacttgccattctaactggcaggagatggtatctcattgtggttttgatttgcatttctctaatgaccagtgctgatgagctttttttcatatgtttgttggccacataaatgtcttcttttgagaagtgactctttgaatcctttgcccactttttgatggggttgtttgctttttttcttgtaaatataagttcctcgtagattctggatattagctctttgtcagatggatagattgcagaaattttctcccattctgtaggttgcctgttcactctgatggtagtttcttttgctgcccagagtaattgatagattcagtgctattcccatcaagctaccattgactttcttcacagacctagagaaaatgactttaaatttcatatggaaccaaaaaagagcctgtatagccaagacaatcctaagcaaaaagaacaaagctggaggtactgaagatttaaagactataattttcagaataataagaattttggaagcacttgaatttcttataatttaaggtgaaatgaactattttgcttgagagcaactcatctgtgaatataaagatatactgattcctaacacttgcattatctatttgcttttttctgtttaggacatccaggcagaaattgatgcccacaatgacatatttaaaagcattgacggaaacaggcagaagatggtaaaagctttgggaaattctgaagaggctactatgcttcaacatcgactggatgatatgaaccaaagatggaatgacttaaaagcaaaatctgctagcatcaggtcagaatagtcaatatcaaaataaaaataatggggtggaaggggtagatacttgtgatttttgtatatcagaaagagaaagcgcagccttaccaccacttctatttcatcagaaatagtttaagattttaatgcaaagcctgtttccttgagttatatagttcaagctctatttgtgtccaatactttctgccacctgttctagactattcataaatgttcatatattttaaatctaacaatactagtaacaatactgttagcaacatctgctaattactgagtgtttaccttgactaagtacttgttaggatctttacaaatgttactttatttcgtaatcaaaaaatcctagtaaggtgggtggtaacattatttcttctatgaggaaacagaggtttaatgaatataaggaacttgccaagttttggggctaagaagtgccaagtcagagtttgaatctagatcttttttactcttggcagtgaacatgttttgcttaatcatgttgttttttatgcctcattcaagatgtatttatagaaattaaatatctcttatggacactaaaatggaaaattgatgattcatgtctgcatttggagagagtaaaattaaataaggatgaaccttaggaccagaattctgactaggaaaagaccttgaaaattacccagagagacagtatgattagtgttattgggatcaagaatattttaagatcatatttaatagagagtggacagctcctaattatatataaatttagtgaatactggctgaaaaatatgttattgagcaaaaatctaaaagcagaacattggcaggaagtcctggatcagcttttgttttgttttgttttttgccttgtaccaagtgtacatcctttaaaccaaatggtcttgaatttgactctgacttcactatttactctctgatcttgaacaaactactcagcctctttgagccttggattattttatttacaaaatcagaatagaaatatttaacactcatgattgctatgaagatttaatggaatggtttgatagttccctaatctatgtaaatcctgcctaagaaagcatctagttaagtatttttatacataaaggggctcactggatctgcctcagctggtttcaagatttaatggagaacagaattttcaatgattacttatcataaatgaattaaaatttttttttctaagatgtattgaaaggtttttattcttctggagctcagagagtggaatttgcagttcctcttacatgtgaggaagggagcaatgcagcatggacatggatgctctgtgtaaagttcccattgggaaatacaataggtcagcattggccaactactttttcttagtaagagaagaaaattagggagttctatgtagtgagggattatacttttttaagatttgaattttcaactgcctagatcccatcaggttgcaactttccattcctcataaatatgaacaaaaatatttaaaatattaatagtgaaaagcattcactgagcatccagcaagtcatctatgccagcaacctaagaattccagagctggccctagtgaagatggtatacatggtgctgggattttcagaggttagagaatgacttatttaggaagaataatttaatgaagacctatatcataaacagatcattctaagtaaaaagttacagacaagaaatttttggtctttcttgggagttattgcctaagcctatcatgacacatttttttttaacctggaaagaaagaacttataaactacagttggaatattatgtaataagtaagttaacattatttttagaagatgggagaatatgcttgtggcagtggacttttgcattaaggtagatcagacattccagtaaaatgtaataataaattaatgtgataatgaattaaaataacttttactttgattagtcacctcaagagattcaagcacttattcaagcatgtaataaaaacttatttctgtgcttaaggcattgctattaataagatgtagtccctacccctagaggttcacaaatctgtttagattaaggtagggcccaaagcagagagtggttactctcacttcagatgatcaaagaaggcttcataaaagaggtcattccttagctgagccttgaaacatatatagttattccccagatagtctaggtgatgactggggaagggtaactaagttaggggcttgaaataacactgtgttgatatgaaaatcaatacattaagtctggctgagaatacagtttgctgctggtgtcatggggaaaagactatggctaacaaaaagacagaggtgtaagagacaagtcatgcacacctatgtgtaaccaagctcccttccattgtggatggaattgggagccttttgagtaacatgattagatttgggctttggaagaatccctcacacagctacggaggatgcctcggatgagcctgttctgaagaggggagacctggtaggagacactttcggcatctaggaaagggaagagagattgagcagataattagttcacgttgttaagacactggtgagacatccaggagaagacagccaaagccattagatggagatctgctcttcaaaagagagcagtaggtgaaatagacagacgggaggcggtgtccagagacaggtggcaggtaaccattgtgagttagttattagagaggttgaaacattagaagagggcaaagaagtccaagaaactctaatacataaggaatggtgaaggagagggaagcagcaaggaaactgagaagtccctatcctgaagagggatgagatccaggaatgctgtcgagagccaaggaaagagggatttctaaaagaagtgcataagtaatggtgcaagctgcttgaggaagtggagtaagatcaggcctgcagagtccaggagcaattagaagggctttggtggccttttgccagggccttttttttttctggttgagggagaaatctgattgcagaggactaaagagacagaaggggaggtgagtacgtggaaaaagaactgagtctactcagtctcgttatctcaaggaactcatctgtgaagggaagaggagggaagaatgcatttgctctattattatagttgatagtattgcaagtttataacagcttgaagctgtatctgtatctatattaacctgtccgtgcttttacagagattagatatggcttttaaaaatttttttaattttatttttaatgtttgtgggcatatagtaggtgtatatatttatggagtacacgagatattttggtacaggcatgcatgcaatgcataataatcacatcgtggaaaatgtggtatctatcccctcaagcatttatcttttgtgttacaaacaatccaattatacttttttagttattttaaaatgtacaactaagttattattgactataatcacccttgttttgctatcaaatactggatcttattcattctttctaactgttttatacctattaatcatcaccacttcctccccatcacccccctgccccaccaactacccttcccagcctctggtaaccatccttctactctatctccatgagttcaattgttttgatttttagatccccaaaataactgagaatagtcaatgtttgtctttctgcacctggtttatttcacttaacataatgatctccccttccatccacattgttgcaaatgacagaatggtggaatagtactccattttgtataaatacattttctttatccatttatctgttgatgaacacttaggttgcttccaaatcttggctattgtgaacagtactgccacaaacatgggagtgcagatatttctgcgatatactgatttcctttcttttgggtatatagccagcagtgggattgctggatcatatggtagccctatttttagttttttgtggaacctccaaactgttctccatagtgtttatattaacttacattcccaccaacagttcacaagggttcctttttctccacatgctagacagcatttgttattgcctgacttttggataaaagccatttttaactagattaggtaagtttagctaaaggcgtaaatgatctcttctttatttttatatttaaaaaatgaataagataaaattaaaatagcatgtttgttattacttggatatttataaaagataaaatagtttgttatttaatttagcctctgcatttgccaaaaatggtggcacgtggtatgtgttcagtaattgttagctattattattctcattgattacctctttgtttggcactaatttaaaatacacaggaattctctctaccctatgtttttctctcggtcggtaatgttggggatttctgagaaggtctcccaaaacagcttccccctttgctggctggattctgaacaagtatgaaacaaagtgtgctcaaggggcattcatcatgtggccaatagagaactcaaatgccatgttaattactgatagaggccaggttggaggtggtaacttagagtgaaggtgagtggagctgtcaaccaaaccccagaatgaggcagaatcaccagcagtcactgggcaaggtggcttcccaagtgagaaaccatacatggaagagtagaaaagaactcagtatcttcatggcctgtcgtcaagtggaccgtatgggctgagctaagcatgcccaattattctccctgaatttacagatcagattcgtcactctacctttgcagggactgtttcaggggtggagaagagaccagagtgtgcttagtgagaaaatccctccccaaggagtgggaggagtgttctcataacaaatctgtagaggcaatccacctcccaggctcctggctccttcattgcctactgaaagtgatcactgtggagcacactgttcagccctacttctctgttctttcctctcattcctttcatgcacaatctgctccttatactgccttctattgtgaacacattctcctatgtctcaaatatttctcgaaacttttccatcacttttctctctaaatgttgggtttccccttaattgcctacttcgcttgaaactcttttcaatagaggttaatttcctcattttcctcacctagcagccaatgagaatattctgaatctctaccaactgctatggacaccaaacggcctgaataccagccataaacatcaaatgtggtgccagaaaacactggctgaaaagggagccctgtcacacagggataagagggacaattgccagcctcattgtgactcattaagcattgcttctccatctttcaacaacatctccttagaagtgaatgcatccattatcctaatctttcatcatcttatttctgcttcttcctgatctatatataggacatgcttctacattcctcattaattcaagtgtccctttacttttttttttttttttttgagacagagtcttgctctgtcgcccaggctggagtgcagtggcacgatcttggctcactgcaacctccacctcctgggtttaagtgattctcctgcctcagcctcccaagtagctgggattacaggtggctgccaccacacccaacttatttttgtatttttagtagagacgaggtttcatcatgttggccaggctggtctcaaattcctgacctcaggtgacccactcgccttggcctcccaaactgctgggattacagacgtgagccaccacgcccagccccatttaccttttattctccatccttttctccactattattgttggtgccaatatccatattcacaactttttatattttgatttccaagtttctttttactttatctgtaaatgcctttatccctgttctaagtcccgtagaccttgtcacactgggagtcagttaacatttcctgtcatcttggcatccctgagataatcaatttccaggagatcaagggcagactgttttccagagtacacattttattttattacattcgacctggccatgtgcatctgaatgcaattggttttcccctattagttagtgaagagccctctgttgtatcaaatcaaataagaattgttttcaacctcatcagtaagatggctctccttcacattaaggttatgagtcctatccaggggggtgccttccttcattagcttattatatactggacctgtctatctactgttatttaactttacagttttatccagttcatttttattttttacttatttattttttaaaagttttacaatttcagtagctttaagggtacaggtgattttagttacaaggatgaattgtatagcggtgaagtctgagattttagtgcacccatcacttgagtactgtacattgtacccattttgtagttttattttttttatccctcactgccttggtaacctccccgacctctgagtctcatatgtccattatatcactgtgtatgcctttgcatacccatagcttatctcccacttgtaagtgagatcatgtagtgtttggttttccattcctgagttactttatttagaataatggcctccagctccattcaagttgctgaaaaagacattattgtattcttttctatggctgagtggtatttcatggtatacacataccacatgttccttatccactcatggattgatggacacttaagttggttccaaatctttgcaattgtggattgtgctgtgataaacatacgagtgccagtgtctttttgacataatgacttcttttccttttggtagatacctagcagtggtattgctagatcacatagtggatgtacttttagttctttgaggaatctgcttagagattgtactaatttgcattctcaccagtgtttaagcatccccatttcaccacatcctcattgacatctattgttttttgactttttaataatggccgttctggtcagggtaaggtggtatctcattgtggttttaccagcatttccctgaggattagtgatattgagtgtttcttcatatgtttgttgcccagttgtatatcttcttttgagaaatgtctaatcatgtcatttgcccactttttagtaggattatttgtttttgttcttgctaatttgagttccttgtagattctggatatcaattctttgttgggagattctggatatcaattctttgttgggtgcattgtttacaaatattttctctcattctgtgggttgtttttttgctctgttgattatttcttttgctgtgcagaagcattttagtttaagtaggtgccatttatttatttttgttcttgctacatttgcatttgcttttggggtcttagtcataaattctttgcctaggccaattttcagaagagtttttcctagaatttcttctaaaattgttaatggtttcaggtcttagatttaagtctttaatccatgttgagttgatttttgtatatagtgagaaataggaattcagtttcattcttccacatgtgactttccagtgttcccagcatcatttattgaatagcatgtcctttttccaatttatgtttttgtgtgctttgtcaaaatcagttggttgtaagtatttggctgtatttctaggttctctattctgcttcattggtctatgaagatgcttgatataattttgatttttaaaaattaattgagacttgttttgtggccttatgtattttggagaatgttccatatgctgatgagaggattgtatattcttcagttcttgagtagaatgttctgtaaaaagcagttcagtgcgcttgttctagagtgtagtttaagtccagtgtttcttggttaactttctgcctcagtgatgtgtctagtgctgtcagtatagtgttgaagtcccctaatgttaatgtgctgcagtctatctcttttcttaggcctagtagtaattgctttctgaatttggtagctccagagctagacacatacatgtttaggattgtagtatcttcttgttggattgatccttttgtcattatataatgaccttctttgtctttttttttaactgttgttgcttttaaagtctgttttatctgatataagaatagctactactgttcacttttggttgccattcgcatgtcatattttcttccactttaccttgaatctataagaatccttatgtgttaggtgagtgtcttgaagagacactttgggtgtttttatccattctgccactatgtcttttaggtgggaaatttagaccatttatgttcaatgttattattaagatgtgaggcactgtttcagttatcatgttgattgtcacctagacactttgttttctttattgtgttattgttttatagacccagtgagttttatgctttcagaaggttctgttctggggcataatgacctttcatttcaagattgagaactccttttagcatttcttgtgtggctggtcttgtattgacttgcatatgttgaaacattcctgcgtccctgggatgaaacctacttggttttggtgagttatcttattgatgtgctgttggatttggtttactagtattttgttgaggatttttgcatctatgttcatcagggatattggtctgtacttttgtttgttaggttgtttcctggtgttggtatcagagtgataatggcttcatagaatgagttagggaagactttctctttctcacctaacgcataaggattcttatagactcaaggtaaagagggtgaaaatatattatttgcaattgaaaaccaaaagtgaggagtagctattcttacattagataaaacagactttaaagtaaaaacaatcaaaaaaagacaaagaaggttattatataataatgaaataatcaaacaagaagatattataatcctaaatatatatgcatatgacaaattcctttggcatttggctgtgtgaaaaatactttatttctccatcatttatgaaacttagttttgctgaatacaaaattcttggctgacggttttttctgtttaaagaggctacaggtaggatccaaattcctgttagcttgtaaggtttctactgagtctgacttagcagtctgctaagtctgctgttcattcgataagtttttctttataggttacttgatgcttttgtctcagtgctcctagaactgtttcctgcatgttgacattagatagcctgatgactatatgctttgctgatgtcctttttgtagtgagtctcctaggactgctttgtgcttcttgtatttagatgtctaatccctagcaaggctagagaagttttcctcagttatttcctcaaataagttttcaaaactatttggtttttcttctccctcaggaacaccagtgattcttagatttggcccttttacataatcccatatttcttgaaaactttgttcatttcttttcattcttttttctttaattttgtttgattgggttaatttgaaagccttgtcttttgacaggcttttgacagaattttgacaaggctctgaaattctttcttatacttagtctaatctattaaaactttccactgcgttttgtaattccttaaatatgtattccatttccagaagttctgtttttttaaatctatctcattagaaaatttttcattcatatcttgaattgtttttataacttctttatgttgtttttcacttttctcttgtatctggttgagtaacttaatagtcatccttttgtattctttatctggtatttccaaagatttcatattgatttggatttattgctggagagctagtgtgatcatttggtggtgttaaagaaccctgtttggtcatattgccagaattatttttctggctccttctcattgcagaaaactatttattctaattattttttaatttattttttgttcgactatgtgttcttttaaatttctttttctctccttgaggatgtgattttaatgactctagtttattgtaacccaattcagctctgcatggtttcaggggtgaagactctgtatgagttccttggttatagagtctgtatgatggctttctcagatactcattgtagtagtaatgtgcttggtgtgtgagtgggttcactgtctcctgtggcattggaatggcagtggtctcttgaaggttatctcattccccagtggtgtgcacttatttattttatccagtatttcatttactaggttgaacagttcaggtttcaggccagtagtggaggtgtccatgagtaaaaaccaaacaggtgggtaatgtaatacccagtgatgcacagaggtcccagccttgacagaggcagctaggggatctctcagggaaatgcactgaggtcttttcagggaaaagggaggaagctacctcagccctcctgtcaggccagcaggaaagccccactacccagtcactctcctgacccagtttcctggctattcagatgacacagatacctctttccatctgtaggaatgctgatgttacatatagagagggactgtgactctacccctcatgtaagcctgaacctggaaggtacttctcttgtggggatgcagtcaccccactgttctagaatggctgtctacaggtgcacccacgccaagctcctgtgggagcagccccaggtgtgtctgcaatggtgggtgaaggagagaagtcccctcctccaagacccttcaggagcaccagggctgcctgactcttggggcagagctgcagactttctccactgagcccagcattacacccatgcctctgctgaaagaaacttcccacaggtggaaatgtctgggagtcaaggcctgctgtcttcattcttttgtcattcttttgtcccacgggttgctcccttgatgtggagcactccctctttcccctaggaggaggaatccctgagggccagactattgtgaatgctgctgctccactcagtctagcaacccatttggactgccacagtccaggctggtgcagggggaatgtctgcaagggatccagtgatgtgacctgtcctgaagtctcacagcagtgggtgccagcaccagctctgaggggggttgcagaggagtgatgtagactctgtgatattccttggttataaatagccttagtgtgttggctttctcacatgccatgtgtaatagtaacgaacaggtcacgtgggcagactcagggcctcctggttagccagggtgatgcaggtaatggtgacggccaaggtcacacaagttttccccttcctggtgtggtgttattctccttgcagatgctatcatggagtgagtcagttggcctccagctagaaggtggcacttggaaaagggcactggctgtggtggtactggtgggatttatgctttgccttatgttacccaggggaggtactctggtgtcccaagcaatgggaggggccatagagctcccaaaagtttctgttttttttttttttttttttttgtgtgtgtgtgtgtgtgtgtgtgtgtgtgtgtgttaagctaccaggaggagtgaaggggcaaaaccaggagggaggtgggtcaggcaagtccatgctctggctctccacaggcagacgcaagcagcagccctagtgggattggaggacagtttgctggctgctggggtagtgttccaaggaggagcacagctgcctctgctgcacagaagagtgcaaatgaggggggtgtagccagcagcagtaagacccacctagcttccctgcacttggcaaggcaggtctcacatctgcagcattccactaacagcaacagctagcaaagttccagccagtctgcactgaaactcaaaactgccccagatcataagccttcccagtggagatggaaactgcagggctttcaggccatgcccatcctcatctgcccatgaagcaggggcacccagctcctatgcccactcaagtttatatcatgaatttcagttgggagcatctcttaacctgcgacccgtgcctgagttaattggctgacctccacaaggtctcctgtgagacaggatcaggaatgacttcccttcatccctctggagactgggagtgcacacacagcacatcccgatgtggttccttctcatctactccccattgctcactacaccagctccggagctgggtagggttaaggccttttccctgacctggattgccaggttccccggtgggtgtgtatgtgctgtaggcagtttctccctttttcacactctggggacttacaatttttggcctggctcatgatatacactgcagcctgctgcttctttcaaagggtctgtggtgtctgtcagttttcttgttaagttcctgtgttgcttcttggaaataagttcacagtatgaatctttacacactatttcgtctttccaagtggaagaagcatgctaacaatgcttccaattcaacatctagggaaaaaaaaagttttattcagtttatatgctagatctacaatatttcaacttgattatttatttatttatggaacagagtcttgctctgctgcccaggctggagtgcgatggtgcaatcttggctcactacaacctccatctcccaggttcaagtgatgctcatgcctcagcctcccatgtagctggaaatacaggcacgtgccaccatgcccagctaatttttgtatttttagtagagacaaggtttcgccatattggctgggctgctctcgaactcctggcctcaagtgatccaccctcctcggccttccaaagtgctagggttacaggcgtgagccactgcacctggccccaacttgattatatttaaatgcacatcctaaagtattttcaactgtcaaattctccagcttttaaacatttattccttttttttcctgaattttcacatctttcttctaatcttcagttacttaaacccttcctcttttcagactccattaatcccttctacctagtttggagcccatcataagatacttcagcagtgtcaagagcttgaatttcctttccccttttaacttcttctatttcccagtctctgacattccaatgtccatactctctctatcccttgtctttaatcttggattctgcctagtgttgcactagaaagtgaaaaatggtaacattgatcctgctataatttgatactttctacttaaaattggcattgtgatttgcaatgattttctattatattcaccaccttgtctattttattttattttttaattatttattatttagatttcatgtttattttatttaacttttactttcagttcagggtacatgtacaggtttgttatataggtaaactagtgtcatgggggtttgttgcacagattatttcatcactcaggcattcagcctagtaccctatagttatttttcctgatcctctccctcctcccatcttccatcctctgataggccccagtgtttgttggtctcctctatgtatccaagtgttctcatcatttagctcccacttataagtgaagacatgtggtatttggttttctgttcctgcattagttttctcaggataatggcctccagcttcatccctgttcctgcaaagaacatggtctcgttctttttcatggctgcatagtattccatggtgtatatgtaccacagtttttcaatccagtcttatcattgatgggcatttaagttgattccatgttgttgctattgtgcatagtactacaatgaacatacatatgcatgtgtctttataatagaatgatttatattcctttgggtatatacccagtaatgggattgctgggtcaaatggtatttatgtttttaggtctttgaggagtcgccacactgtcttctcaatagatgaactaatttacactccaaccaacagtgtaaaagtgttcctttttctcctcaaccttgtcagcatctgttatattttgactttttactaatagccattctgactggtgtgagatggtatctcattgtggttttgatttgcatttctctaatgatcagtgatgttgaaggtttttttttaatatgcttgtcagctgcatatatgtcttcttttgaaaagtgtctgttcatgtcctttgcccactttttatggtgtttgttttttccttataaatttgtttacattccttatagatgctcaatattagacctttgtcagatgcatagtttgcaacaattttttcccattctgtatgtttactctgttgatagtttcttttgctgtgcagaagctctttagcttaattagatcccatttatcaaatttttgcctttgttgcagttgcttttggtgtcttcatcatgaaatttttgcccattcctatgtgtagaatggtattgcctcagttgtctttcagggtttttttttttatagttttgggttttacatttaagtatttaatccattttgagtttatttttctatatgatataaggaagaggtccagtttcaatgttttgcatatggctagccagttacccagcaacgtttattgaatagggaatcatttccccattgcttatttttgtcagctttgtcaaagatcatatagttgtagccatacagccttatttctgagttctctgttctgttccattggtctatgtgtctatttttataccagtaccgtgctgttttggttactatagacctgtagtatagtctgaagtcaggtatcatgatgcctccagctttattctttttgcttaggattgccttggctattgtgctcttttttggtttcatatgaattttaaaatagttttctctagttctgtgaagaacattattggtagtttaataggaatagcattgaatttataagttactttgggcagtatggtcattttaatgatattgatccctcctatccacgagcatggaatgtttttctattggtttgtgttgtctctgatttttttgggcagtgttttatagttctccttgtagagatctttcccttccctgattagctatactcgtaagtaatttatttttttgtggcagttgtgaatgggattgtgttcctgctttggctcttggcttgactgttgttgatgtgtaggaatgctagtgatttttgcacattgattttttttatcctgagacgctgctgaagttgtttattagcttaaggagcttttgggctgagactataaagttttctggatatagaatcttgtcacctgcaaacagatatagtttgacttctcctctttctatttggtagccctttatttctttctctttcctgattgccctgggcaggacttccaatattgtgttgaaggagtggtgagagagggcatccttgtcttgtgccagttttcaaggggaatgcttccagcttttgcccattcagtatgttgttggctgtggggtgttgtagatggttcttagtatttagaggtatgttccttcagtatctagttcgttgagaatttttaacctaaggggtgttgaattttgttgaaagccttttctgcatgtattgagataatcatgtggtttttgtcttgttctgtttatgtgaagaatcacatttattgatttgtatatgttgaaccaaccttgcatcctagggataaagcctacttgattgtggtggattagctttttcatgtgctgctggattcggtttgccagtgttttgttgaggatttttgaattgatgttcatcaaggatattagcctgaagtttttttggtggtggttgtgtttctggcaggttttggtatcaggatgatgctggcctcaaataatgagttagggaggagttcttcctcctcaattttgtggaacagtttcattaggaatggtatcaactcttctttgtacatctggtagaattcagctatgaatccatctggtcctgggcttttttttgggtggtaagctatttattactgactcaatttcagagctcattattgggctgttcagggattcaatcttttcttggttcagtcctgggagaatgtatgtgtccaggaatttatccatttcttctagattttctagtttatgtgcatagaggtgttcataatattctctgatggttgtatttttgtggggtcagtggtgatatccctcttgtcatttctgattgcatttatttgagtcttctctcttttcttctttattagtcttgctagcagtctatctattttatttcattttttttcaaaaacccagctcctggataagttgatcttttgaatggtttttttgtgtctcagtctcctacagttctgctctgatatcaccatgcctattttaaaagattttgatcctttttagtccccaaattctctctctgcaggtggccttttttttttttttgagagtgaggctatctgattgatactctttatgctacttggagtatttaatatgcattggttctgtatttcacattatgcttttattgcgctaaagttgatattaaagttttatagcataaaatgtcatggcagggaacatttgctctaatttatcataattttttaaaaagaaaatgtctgctaagatcataataacagctaatatttatatgctagatctaccctaagtgttttacaggtattaacttctttgaccatggtgtggccattggaacaatgtaataatatgtggctcaataccataggttaatatcttaaacgttatttttcattctctttggatagccatgattaaactttttttttttttttgagacagagtctcactgtgttgccagggctggagtgcagtggcatgatctcagctcattgcaacctccgcctcctgggttcaagcgattctcctgcctcagcctcccaagtagctgggattacaggcacccgccattacgcccagctaattttttgtatttttagtagagacggggtttcaccgtgttggccaggctgctcttgaactcctgaccttgtgattcacccgcctcagcctcccaaagtgctgggattacaggcgtgagccactgcgctcagcctaaactttttatatgctaaaatccaacatgctacatctcctttagcatctaaaacaatacatacaatgataaatttcacttcaatctgtacaagagaagaatgctaatgatttgaaacgtcagctagaagacaggctgtcaggaacttttattatattttttactcactggaaaaatatgaattggaaatacactaataagttctctgctgtggataacatgggtttaaattttcatgttaaacttatttaatttgagattgtcttaattaaatatccatttatcagcataatgatgtttaatatagatctttattaacatggtttcaaaggccagtaaaattgtcaaatctaatgaaaacagagttcaaagataaaattctatcttccctttcttttatgagtctattaaaaattcagggcacctttttaaaagcccgtagagaagattaacctttaacatcatcatttaaatctaatgttaccacattttacagtgtcattgacactatgtttagccttagatagttgcttttcctaaccatattgtgaaactactaaattttttttttttccaaatctaatagaggaactgctctcttttttttctggtttctctagtgtagcacattctaatagaactttctccaatgatagaaattatctatatctacactggttaatacaattgctgctagccatatgtggcctaatgagcacttgaaatgtgaccagtgcaactgataatctgaatttcaaaatttactcattttatttatcctaaattaaaatttaaatagccacatgctgctgatgtctactgtattggaatcacggctttggtgttcttttcagcaccgtcagactgaattctgaagacttgactcttttctcctaatatgtcttaattcctttcctgggagtaggaacaatcttttaaagttacttgttgttcttggactaataaaggtattttctttcattataacccaatttatagtttggagattttaccataaaccaaaatatatatatatacttttgtagtaagaataccaaattggacatttgattctgggtagtcattacacaacagaggatgggatatctgccagagtgggtgctccgtaaatgtttacttgtgctgagtaaatgaaaaactgtattttattttaaccaatgctccttctcacacttactcacactatttccttttatatctgtacactgggagaaggaataataacttgcttgaagatacagtttgtttgaaagttggaggcttttgctgatttaaaacagatactggtttgtagttacttccataattcctttctactgtgcttaaatgatgaagtaccatttttatgggtctttaccttctaacatgtttttgcattacattttttaagaataactggtcacttaaaaatacttatagagttgtaaaaaatgattcaattttaaaaggagtaacttgcgtaaaagatattctgtagtagacatcatcctaggttgataatacagtcaataaaagtgtttattgctttgtacatatcaaagtactaaaggagtgaactgaagcagctgagatgttagaataagtcaattgtctaaaaatatgaatgcccacagatatgtttgataaagaaatgttttatgtgaagattttgaaaatctggttgatcactagttatcaatagtcttagagaaatttaagttttaaaatgcttataggataattgagaaagtaccactaagctgaacgcaaatttaaagtttcttcttacaaagcattcgacctgttgcccaagaaaaggctttcatctttcaagatgaaagaattaaaatgaaactagaacactgaaggctgctacagaagcatgcatttatttgagcatatggtagtaatccactaaacacatagttataatctatttgagaataaccagaacagatttgccagacaaagattctggcagatcaacttgctttttactatgaaaaatcaaagatgcagagaagcacacatataccaatgttttctttttgatttcaaagccacttcagcatttcttttaaaaagtattgtcttcatcctcataattaatagatagtttttcagattctaaatactgtaagtttcagtaatcagtttcattatttctgtgcagtcaaagaagactgcattggaaaatatgtttgtgtgcatttcaatacaataagtgtttgcaactcaatttcaaaggaatataatgtgtgatttagttattgattattgagttaaactacagacgttgaagatgcaggatcaaatcatctgaaataaaagggcagggaacacgtataaatgttttgcacacggagacactcaagtgcttcttgattgaggacatctgatttctagctggttttgcaattaaaaatattggaaagaaattgcagtagctcagtcaaatttatttgctgcaaaatggcttagaactacagagaattttcagttaatataattgaaattatttagttctgctctgtgacaagtgaaattattagttatcagggaaaggtaattacatatttggcctaaagttaatcaatatgaacacagaaaagctggagctcaagcagaatcaggaccttgttaaccacagttttgtaaaatgagttcaattgtagcacctgtggaataaatagaactgatcataaatacaagaaaataaattttctaatcatactgttctcagagatttacaaaatgctttgaacttcgttctgtatttaaactttttttattatttcacacagcgttttttaatcagcatatgctgatgaaaggcagacgtgtgccttgttacacctctaaacctcaaagatcatgggcagtcacagtaattccatttccccaagttaaggcataagcccgcattcacagtctgccctctgggatgatgcaggattgagtcaagcccagttcgattccttgagtcgctggagttgtttctgactgatccatattttcaaatccagcccaccagtgggcctgaggctggataagtgggctttcaccagggccctaacaagagcaaaaaaggaacatgtgcatagatttatactcctattctcaagggcctttgctcttattggaaccttaaccatatcaaaatgtatttcctaaacatatctgtgattatggagttcataatctaagaatctgaaggtgcatttctgtgttaaatgcagaaattattattgaaacaaagacctcacctttaaatgagagtataaagtactgcagtgactttcgcccaactgttctctattcacactggtcatttgtcactagacattggtcaaccttaagccaaatagtatcctgtcgaagcaatgcctgattattttccaactttttgaagtaaacattgctattgttctgctttttggttacaacagaaggagtttttggttacaagagaaagtaacacatcagtaatttccattcctaaaaaagttaatcaagaccaggcgcggtggctcacacctgtaatcccagcactttgggagtccctggccggtggatcatgaggtcaggagtttcagaccaggctgaacaacatggtgaaatcccgtctctactaaaaatacgaaaattaaccgggcatggtggcacatgcctgtaattccagctgtattcaggaggctgaggcagcagaatagtttgaacccaggaggcagaggtcgcagtgagccgagattgcgccactgcactccagcctgggtgacagagcaatactctgtctcaaaaaaaaaaataataataataattagtcagtggtttttttttttttttttttttttttttggaaagaaaaatactatgagtctgttgtaaatccttaaatggcgtaaaaatagctaaaattaggtatttactgtgctcttagtggttattttcctctctctctctccatgtatagagataaaatgagaaaaaaatatatttggatgtgcgtatatactatacataaactatcaaaacttggtttataattgtacattctatcacggacatccttcttgaaagccttcgttttgtataggtctgtgttttaaattttgatagttattaccaataaatcctctgaatattatagcctattcaaaatagctgtttcttacaggaaatggatatatgtgtgtatacatatgtataaatatatatacttatgtaatatatgtattgtatatatgtatatcatacatatatatgtatatatagtatattataaatacatatatatatgtatttacaaggagtcagtctcttttgtggaagtaaacattacttggtcagataagattattatgctaaaggaaggtagataattttgtgaatgtaatttgcatttctaaatgtggttattattattattattatctctcaacagggcccatttggaggccagcgctgagaagtggaacaggttgctgatgtccttagaagaactgatcaaatggctgaatatgaaagatgaagagcttaagaaacaaatgcctattggaggagatgttccagccttacagctccagtatgaccattgtaaggtaagtggataacctatagtgagtcgcttaattcaaattctagtgaggtagatatttgaaatacaattatagataagtatcagagttgaaccaattatcacaggattcccccccccaccaccgtctgcttttagttgccagtagacatttaaagtgcatacattgtttccatttgtattatcttcacatttaactaaatttttttcaaacactaccagtatctgaagtataatattgcttttagcttattatgaagtttatctaaatttctaataggttttagaatcataatatattgaggttttgggttttttttgttttttgtttgtttgtttgtttgttttaccaagtttcactcttgttgcccaggctggagtacaatggcatgatctcggctcactgcagcctctgcttcctgggttcaagcgattctcctgcctcagtctcccaagtagctgggactacaggtgcctgccatcacacccaactaactttgttttttttttttaagatggagtcttgctctgtcacccaggttggagtgcagtggcatgatcacagctcactgcaacctctgcctcccaggttcaagtgattctcctgcctcagcctcccaagtagctgggactacaggcacctgcaaccacccccagctaattttgtattttgtatttttttttttagatggagtctcgctctgttgcccaggctggagtgcagtggcatgatctcagctcactgcaaccttcacctcctgggtccaagagattctcctgcctcagcctcccaagtagctgggactacaggcgcatgccaccatgcccggctaatttttgtatttttactagagacgggatttcaccatgttggtcaggctggtctcgaactcctgacctcaggtgatctgtcttcctcggcctcccaaagtgctgggattacaggcatgagccaccttacccgacctgagaaaatttttaaactacaaattaatcttaaattcaaaaggcatcgagtcataaggaattacaaactatcttgtttgtgtttaataaaagtgaaaaataaggacttgtagtaaaaaaaaaaaaaagtaatgcagatgaagaccatactatttaaaatcattttatgtgttttacttttctgagccaagccttttctttgattacatttttatactgctcaaatttctgttcctatgcaaatgtatacttttactctgatcagccaaaagatatgctgaaatgttatcaactgacacattaatccttagatccttgtgtgattaaatttgtgccttgttcactttccattgatttctttaatatctctttatgcccattttcttgtatatacatatcatcttattttattgtatttttcactcctcccatgtaatgaaagttctcattctaaatctggtcattttaaggtgacactatgattctatttccattttaaaaatgacaaacacgaatgcacacatctcctaaaggaaaatgtcatttatgtaataagttgctttaatacaaaatgataagaccctgaaatttatttatttgctttttgaacccttgtgactagattatcaaaattaccatttgggtgtattttttttctttctactcgaagcaggaatatgatagagaaatagctccaagataagaaaaaggaaaacactgttgatgtatgatatgcaagataataataataatagaagatttaaaatgaccgatttaagaaaatcctattctctcctaactttttctaacttttacttctattaattattcatacagtagtccctttttgtgggttacagtattagggatgaaacagaataacacaaagctcttctaatagatgtgctctgtaaggaatacaagctgcttatggccatatgctaatagtgtttaccgaaatccacatcttgaggtatgaaatgattttcctcttctggccttagcacataaagtatgtatcagcctctcagtctgtcctggctgtattttggcctccctcccagcaaggtaacctggatttaggttgtgttttgctctatcttagagcactgcaggcagttgctctgcttcagtccttgagacctaagcctttaggtaatgaagataatactgataatgatggtaatacaattggttcatttattcagcaagtatttattgagtgcctaatatgaaccagcatattctggtcactggtgactcaataatgaacaaaaccaggttcttacctgattgtgagagatggacactagacaaataggcaataaatatatatgtcctacggtaataacaaaaataaagcaaggtcaagaagatacaggaggatgtgggattataggccaaggtgctattttatatggagaaggtcaggaaagtatcacaaattgggtgatttttgaacagagacctggagtgatgtagtaagcacttagcaacccctcttgaaagtagaacatttagggaaaggaggcagagagcacaaaggccacagagcctgcaatgtttggggcatatttgaggaatagctgggagaccaatatgtttgaaaaaatttagccaaatatggtagataggagatgaagctggggtggcgggtgggagaaagggattcagatcatttaggtccttgaatattctttcttaaggactttggattttactcaatgagagaggaagccatggaagatgtaggtatctatagtgctgtgatctaatattatgtaataatataggtaaattatgaagagtagaatatagaggagttcagcactatttcagtaacccaagtggtggtgaattggaaaagggtatagcaggagagatgatgaagagtaactgctttctgaagacatttggaaagaatcaacaaaatttgctgatggattagatgtgtggaatgagagaagaagagccaaagatgtcagaagtcaaagatttttggacaaagcaaatagaaaatggaagtaccttttagagagataagaaaactgctggaggagcagtctgggaaggaaatgtaagagctcgatgtttgacatgttaagcttatagatgtttaagctgttggatatataaatctgaagttagaagaaagatcaggattagagatgagttagaagaaagatcaggattagagatcaaaattgtcagcctgtatatcagccctgggattggatgagatcacctatagggagagattgtatgtgattgtaccaagggaaaaaaaatattctaagaaatgagccctgaggagccacaacttcagaggttgggaaaatgaggaaactgagaaggaagagccagaaggctagaagaaccaagagagaacagagtccaggatgccaaaggaggaaagtgtgttatgaaggagggcgtgatcacaaggatcaaatattgctgagaggttaaataagatgaggacagaaaattaatcatctcgagaccatcttgttgaccttggacaagaggtgttacagtggcatgatggagttggaagcatgattggagtagattcaagagagaatatgaacaaaagtacagaaaaccattttaaggacttttacaacaaaggtaacagaaaaatcagatagtagctgaagaaagaatgtagggtcaagtagtggttttataactcattgctgagtagtgaattatgaaataatatattaatattattttattattcagcatgttctatgctggtaagaatgattctgtgaagtgggaagaatcagtgatgcaggagagaggataccagctcaaacagtggcaggatgcaatccattgcacaagtggagcagtgggtcttaggtctgtctgactccaaatatattcatcatccatttaaaacctacttaccgaataacttttatgtcctagcaccattctaagcactggagatatatcctcacatttttgtttttgtttttacttgagtctgttccctcttttttgctctattatgtcagtttcctagcttagtttatgaaagaatatgaagccacctttttcaccctatctttttctttagctgccttccaaaaatggacaataaagaaatgaatattaacatattattctcaagaactaatattttagtgtataatgctagctttctgctaaattagtactcggtatagattagctgaataagttgattcacagaatttatacaaaaaaccctccagttatctgcttcctctagaacatgacacagtacagaaaggtgtgctgggtttggggtaagcattctttgtaggtcattgctgaagtcacagggctggaggattccttgattccttccagggtagccatcatgtattaataagtaagttagttgccatcatgtttgacattacccttacagaaaagaaaaactcgagggaagaaataaaagcttaaaagatgaattttctggctgggcgtggtggctcacacctgtaatcctagcactttgggaggctaaggcaggcggatcatgaggtcaagagatcaagaccttcctggccaacatggtgaaaccccgcccctactaaaaatacaaaaattagctgggtgtggtgacgtgcgcctgtagtcccagctatttgggaggctgaagcaggagaattgctggaacccaggaggcagaggttgcagtgagccaagatcacgccactgcactccagcctggcgacacagtgagactccatctcaaaaacaaacaaaaaaacccaaaaacatgaattcttcatattttctttataggttgtgacatttgctgttgctttgtgagtaaaggtttgaaagtccagtgtcacattttttaatgtgagacacaagatctgtaatgtagataatctactgtgaattgtgtgtggccatgggttttagggtgcactggaggcaggtaaggagggttgttggctcctcataggtgtgataatttgggttagaggtgtgagtgaggtactggtagtagaaaaggcactgagctagaatgagaatacttttatttaaaggctggctctgtcactgatgacctgggtgaccctgaaaaagtcatttgacttacccaagcttcagtgtatggaaataagtagtatcttagttcctttgggctgcagtaacaaaatactataaactgggtggcttataaacaatagaaatttatttcttacagttctgaaggcggagaagttcaagatcagtgcactagtagatttggtgtctgccaagggcccactgtctggttcatggatgatgtcatctcactgtgtcctcccatagtggaaggtagtcttttatatgatactgatcccattgatgacagctcctcactcatgccctaatcaccttccaaagacccacctcccaataccatcactatgggagttaggatttcaacctgtaaattttggtgacacatagacattcaaactgtagcaagtagttccatttctacacagaattgttctgacaatcaaatgaaatagtggaaatgaaagtaatttaggaaaagtaaagtgctgaagggcagtatataattttatttaattatgtatattctgtcaaaagcaaccttctttaccaattgccaagagtaatgttttaaaattacgttactataaatattatataaaatatatataattaacattaattcatactaatataaatctacattattacagttagggctaatgattatgcatttgtagatttagagcaatatttaaagaagtgtggtacctacccgtaattatttatcttactgaacatcatcagtcataattatcgaatagtctaagcatagtttaaccttagccttgcatccaagaattcccttcctaagagtttatttaatagtttttggccagtgttcgaacataaacctaagtctctaacttatcctgagtcttttcttgaaatcaaaatctcttatgggtgtgtaagagattgctctatatttcagggcagctttttttttttttaagtccttgaaaatgtccttttcctctgctgtcatattccattgatcaggaaaagtctttatttagtgtatattcatgtataatttagaattgtcaattactggactgaaagaaccctaagaaataagagtccagtcctcttatttacggtagaggaacatgagaggcacagtgtagtttaagcaaacctgagttttcatccctccttccctctcttactttcatttacttactatatgcctggcagtttattttattttttaaggaaaaataactttattttgaaaaaaaatcaattctctatttaaagcatacatgagacagcatctttcatttagtcctaaacttgattacgtattctcattataatattccaatgacattctgcaaatacatttcaagtatgtcatcatatacttattggtaaatatcaaacaaagctactgactgtgagggaaaattttccgtaattttttttacctacccagagatactcatcccactgtatatctgggatttttatgaacatttacaaattttaacaaaattcttttttttcccattgcatgcatcaatatgctaaattctccactacaatccaggtaaaatactgatagtgtgtgaaaacccagtgtattttctaatactgcccatgatagacagagtgaaattacagcataaagagtagccaggaacctatactgtaaacattatttggctccaagtatcttgcaacaaatagctactaataggactatacatagcacatagagcacagcaatcctggattgtagtatgcctgtaaaaccctttaaagcattttttctcaacctttttatcattaccctccttttcaattacaaaaattaaattcaaattaaattaaatagctttaactataaatttcttcctaatgagagaaattaatacaaaagattttgttgggtaggctgattttggaaggtcacaatccatatctaagatttttttcaccccaagaaccaatttttgttcccagttgagaatgtaagggttaaagttgatgaaataaattaaatagcctttaacattattagagagaaaaaaacctaatgggtaacaatggagattgagatagttgacttctagaccatctctgttccatacttgctgtatgatcagggaagaaatcatgtctctttattttgttgtttgggagaacacaggaatagcataaaacctaatagcttggaaaaatcacttaatctcactggactcagtgaggctattaattgaaagaattggtatagatcagttgttttcaattctggctgcactttcctaggacatataaaagatatcaatgctcagttatatttacccaggccaattaagccagtctctggaggatatgggctcaacctatagtgtaaatcagaatcacctgatgggcttgttaagccacagattggtaggccccactttcagagcttctgattcagcaggttttgggtggggcctgcaaatgtgcattatcaagttctcaggtaatgttatgctattagtctattgaccacactttgagaactgctggactaggcatttgtgtaagagtgaatgtgtgtgtgtggtgtgtgtccccaggtgacttctaatctcaaaactattcgtatagaaaatttcaataaggttcttttaagttctaggatactcagattttaatataataagagttgttaaacatcaagatggcttataaaaggagacctatggacaaatatcaacttcttggtcaattttcattaaaaactcgtttcttaaagctttttacagtatttttttgaaaattaactttttttttttttagctgcatatatgggtcttcacttcacttttcagtaaagataacttatttggttatcagtgtctgatcatttgataagaccaatggaaggtttggatagtagccagttatttttgaattgcttgaagagaatcttgtaaatttgtagtccagaggtaattctgcgattgcttcaatacttggaattgcaatagagttgtaagtactgattcttttacaagaccatgtataaaccaagaagtcttctgtattttccagtcccaaaactgaatcgataaaaaagagtgccattttttagataaagtgtttagaggctttgcctttggcctctcatattttcctttcttctctagaggctctgactcctcgggcctctgactcctcacgccttcatcccctctgagttcttctaggatctaagacaccagagaggtcctggtatagaaaaaaacacagtccctgtttacatgaaatttacattcaagggagatcctctgcttatccttaaacttagagttcctgttctctgtgttttgagaaatcatttcccaaaaggttatggctgagctgtgaactgcgcattgttatcccaaatctcaggttgtctttgcccagtcatccacttctgtaaccccaacttttctcccttggtgttttagtctgtcttttgctgctgtaacagaatgtcagggactgagtcatttataaggaagagagatttatttggctcacacttttggaggctgggctcacagttccagaggcggggaagttcaaatcaagggcctgtatctgatgagggtcttcctgctgtgtcatccaatggtggaaagcacaaaggcaagagagcgttcatgacagagaggagatggaagctgaacttatcctttgagcccactcctgctataactaacccactcccactgtgataatgacattagtccattcatgaaggtcaaaccctcatgacctaatcaccgcttaaaggctgctcctcttaatatcagcacagtgtcacttaaatttcatcttgagttttggaggggacattcaaaccatagtacttcgttgcaattcgggcaagcttttagttcatgtacccatttatttccaatctcttctttaagggaatacagaactcttttcaattataacattatgatgtagctttaaacagaacataaaataacttttaaaaccaattttttcagatatgttttagcttactgaaataaagttgcttctcttttcatttagtcttgtctattattataaattctgttagtattttttctgatctcctactttttaggtcttttcctttttgtaataaagtttaaaaatctttttagctacaaagaactcttgtcttacagctcaaaagtacataattagaatcaatcaagatcaaccctcagatggcttgatactaatattagccaaggttttttattccctaaaagttcccatagaaagaaagggaccttgtacttgatttctaattcattctctaatcttaaggtaatagtttgaattactttatttcaagcaacacaatactgattaatttgacgtaaactctcactgctaatttaagatgtctaaagaatatcagatggaattttgtgaagagacaaagaacttaacactaatttaattattccaaaaggtatgatctcataaatgcaagttttgaataccactatatacaacctttatttaggggttgatttatagaaactcatatattctgagtcttctgattccgaactatctttatatattctagtcctttatatgtacataaatgatttaatgactccttttcaaagttactctttgataatagtggtgccaatcatttcattccccatccatccacccacctatccacactattcaccaaatgtcttaatgttaaagttgatgcttctgtacgaagagcaataaggtatagcctctgcacctcagtgatatattttaataattcctattactaaaagccctgtgcttgtggtttgttggctgtatccagagggaatactttacatttaaatgtttaggtgatggctctgagatttcgccttagaatagggatataaagcaatgctttaaagcatctcctatgttcaaacacctagcggttatagatcaaatataaaaaacagaaaaccaaacatggcattgtgggctccaaaacatgacaatcattctacaggccagaaacaaagcagaaaagcaaactagctagtgatgttgatgctgctggaaaaatgtagcagaccctagtgatgagcaggcaggaagccccatagcaaagactcagctcaaaacccttctcttacacacagaaatgagtgattcacagattggcatcctttccttccgtagtgtaaatgccccaggcactgctattatgaaacttcagtgtattgttgatccttaattaaatgtgcgtactttcttgggtgttttaatcagtgtctcagaacattgatatattttcagcaacatcaataataaatactttgttcagtgcttcaacaatacataaacatttgagacctggggcctagcacatagtaaacactcagtaaaaggtggctgatatcttttcccataattgttgggagtcttttctgatagttttgatcatttttattttgtttaaaactatataggctacatgagcagttttaactaaataaaactgtattaatacctgttatttaccacctagtataacccaacagaactagctttcaattactatctagattaacccgtcaaattagacaagggtcaccttatagtctttgcaagtatcagtttggtaaacagcacactcattatttttttcgtgtaagtacatgtttaattccctcaaatgttaacataaattgctacttaaaaaatatgtagtgttttaaggactgttttaaaataaatggataggctaggcactgtggctcatacctgtaatcccagcactttgggaagccgaggcgggtggatcacttgaggccaggagttctagattaggctggccaacatggtgaaacctcatctctgctaaaaatataaaaattaggtgtggtggcgggtgcctatcatctcagctacttgttggagactgaggcagtagaatcgcttgaacccagggggcggaggttgcagtgaaccaagatcacacctctgcactccagcctggcaacagattgagactcccgtctcaaaacaaacaaacaaacaaaaaaaaaaaagcagcttactaataaataataaaataaatgggtaaagttgaatcttcccatctaatgacttcaatcgaatttttagaatcatttttgaagttttgaagaagctgaggtcacttatatgcaacttccctttcaagaatgtgagcttatcattcagtcaacaattacctataatgcacctacaatgtatatagtgtttgtaatgttatggatttactctaaccaaatgctcttgagtggataaaattgcagatgcagattttactgtacaatttgcacttcattttcataacaatgtaaatattaagttatgtaggagcaattatcagagctctaataccctttctccaatagaatgcatatttgatgttagaaaagcaaatctagaataattgaaagtgcatgattcaggtataatttcttgtttgtgtgttctttccctcagggctactctggcctttgcttaacccagtttatttcctatattcaagctttattatataagactcagaacatatctggccttaagctgaattgccaagaaacattagcaaacttgctcattaaaataacaaattctaacattgtctttaaaacaacaacaccctactgttaaatttaggctgtgtgtgtgtgtgtgtctgtgcacacgtaggtgtggtagaattttttttccctactaaagtaatcggagactctgcctgaaattctgtaattttgaggtcttgttgtgttagaaggttgcctacagtgggaaacttgtctttttctgaaattaaaaaaaattattttccaagttcctctccaacctttgccagtctgtgttgacttactccttattaaacgctcagctctttaaggcccattagtcaagctgttacttgtgtgcaggcctgaagcagcagttctgtcagtgagcctgcacctacctgcaacaccccatttggttgtctgcacctggacttgtctcctaatcataatatgtaatattgcaactttaccccaaagggccatagaatgtccatgtttagagggagaggtgagacagcctaataggtgtcactctctggtggtaaaattaagagtggatcacaaatgtaggcaagaaacagaggcctgtaaaaccaatgaacccttttgcaaaacaatcattttactgcctctgcacatatttagcccagagataatttattttatctagcagttcatatattcactcaggttgaaacttctatattgtacctgatgtttgctgcatactttgctaggtgccaagcatgcatgagtttgtaagactatttttgcaatcatggagctcacttcactctctagcagtgatgcaggcttgaaaacaagtactacagtagatattaaaagtgctgtaatacaggcatggacacacagccaaggagacatgaatcacgattatttgtgcttgggaagattgggaaaggctccacagagcaagatgcttttgagctgaaagatgccttggaataagtaagaaatcactaaaggtgttaccaaaatgctttagggagaaaatcctccaaattagccatggcatgttttggagtatgcagtagagtaaggggtgctgcttacctccttttgtgatgatacttagaataagactgaaagaagaaaatacaagttcagcacctaatccagtgccacattagaataggtactaattgaggatcccttagtgaaatatttgggaccaaaagtatttagatttcagattttttcatattttcgaatatttgcattacacttaccaggtgaccatccctaatcagaaaatctgaaattcaaaatgctcctaagagcatttcctttgagtaacaatattgacactcagaaatgtttggattttggtgtattttagattttggattagagatactcaacctgtattgcatatattagctggatgaaggaatacatttatgtgtgcatgtattttaaagagtacagggggccgggtgcagtggctcatgcctgtaatcttagcactttgggaggctgatgtgagtggatcacctgaggtcaggagttcaagaccagcctgaccaacatggtgaaaccccatctctactaaaaaaaaaaaatcaaaaaaatcagctgggtgtggtggtgtatacctgtaatcccagctacttgggaggctgaggcaggagaatcgcttgaacctgggaggtggaggttgcagtgagccaagatcacagcattgtactccagcctgggcaacaagagcgaaactctgtctcaaaaaaaaaaataaataaataaaaagcagggtgcagtggctcatgcctgtaatcccagcactttgggaggctgaggtgggtggatcacctgaggtcaggaattctagaccagcctgaccaacatggagaaaccccgtctctactaaaaatacaaaatttgtcaggcatagcggcacatgcctgtaatcccagctactcgggaggctgaggcaggagaatcgcttgaacccgggaggaggaggttgcggtgagccgagatcgcgccattgcactccagcctgggaaacaagagtgaaactctgtctcaaaaaaaaaaaaaaaaaagtacagggaaggatactattttattactatgaaaagcaaaagaatttctgtctcatttttaacattgatatttggtattctgattcaggcattattttttatgtcactggggtggaaccaaaatgaattttgtatattaactgctcattgagggatgttaaccaaaactttcaaggcactatgtaggagatttttttttaaattttgtctgcataccaacggaaagtaagcctgttttctgtctcctttttcatgtagttttattagtgctatcaaatttaatgagtgctctgcccttttttgctgtcattctgtaatgacttcagatccatatatgctgatttagctttgaaagcaagttgggaaaagagtaaattacattctagcagatttgtctcatgtttgcatcatttatttttttctgcttatattctccagtaagcagttaactgcttttttgaaaccaaaagctaaagaagcctgctgtaccagcaatacctctatttgttataattcagctaccctgcatttagggccagcttctcaggtgtcccatgcagtcacacagggctctgctcttacaaggtttctgcacttggcttaatgttcttctgctgccatcttgagattcttagtaatatttggacaaggggccctgttacactgaggtctgcaatcacatagccagacctgcttgcattgcgaagaacattaacatatatattctgacacatgtaacacaatattgaatgcctcttaaaacttgcttcaagcatctttccatctccttaggtaaggaagccatcctgagccccactctgagttacatgccccttgttgtaatttgtgatgtctctgtttgttagtgttggctgagctttgactaggggttcattccaagacctcacctttcctgctgacttattaactgttcctcggactctacttgacttctagaacaccgcactctcctgatgtttttcttacgtcactggtagctctttctcagtttcccttcctggttcttccttctctcccctgtcttctaaaattgggatgtgtcacttgtcaggccatgtcaccttctctgtattcactccttcttgggtttaaaaatgccatctatatgccaagcactcccaaagatatatccgtttacatgtcatctctacttgagtgtgtaataaacacctcacagttaatatgaccaaactggcttcctgaattggcccctataacatgttctacccagcgttctgcatttcagttggtaggaatattatttcagttgcttaggtaacaaataataatcacctttagtcctgcctttctctcattttcagtctgttaggaaatcctgttggttctctgttcaaaatatagaatctgaatctaccacctgtgacactcctctgtctctggaagtatcagtccagcaaccagagtgttcctattaaaataaatcaaactctgtaggggcttcctaacttattcagaggaaaagccacagctctcggaatggtctgcaaggccctgcctgatctgacctaccccctactcacaccttgctcatttcctctcttgctgttttttctctgacacactggtttcggccacactggtcccttgctgagctttcagtcacagtgccagcctgtctgctctgcccaaaatgccccttctttactcaacttctctacttgaactgcagctccctctgagcactccttctctctctctcattctctctctcttccccccccacccttttctacttctttctttttctatagcatttatcagaatctaacacaatgacttattttctatgtcttttttttttttttgcttggtactctggatgctcgataaaagttgaatgttgactgaaagagctatacccaagggaacatgtcctttggtgtgaatgttccttttgtctctttatttctcagtaattcttttttattcatttgcgttctaaagaatattacattttgaaaatattcctactttaaatagccaaatgtttaataaaggtaataactgaaatagaagtgtaagcaataatcttgtctcgagagctagaaatcatttcagttacatgacatatttgaaatgtaagcaaattaaataacacaatggcactttatgccttgatattgtagtcagttcagaggttatcttttctctatcttaatactgcctaaattttcaactcaagaatgggaaagatttttatttaagggaaaatgaattggcatacctttaattgttgagatagcttttaaaatatagcttttttttttttttagctgtatgtgctggatattgctagattcttccagtgtttgtgcttctctctgttgtaggaatttgatacctttgaatgctagttgagttgagattcttaacaaatgcagggagaagcttaaacatgtggagtctctcattcagtgactatgttgtcatgcattatattttataaataaatatagccccaagtcattgaagcaaaatataaagggaaagttttataattgttacaaatacaaaaaatgggcttctaaacacatttgtaattcttcataatgctgttctttgaaagcagtaatttattcaatgctaaatgagctcaattctagtgggcattcctttcttaaaagtataatttttaattatgaaaataataacatattacagagtttatgaaataaagaataaaaacatggccataattttatcaccataacaacccttttcattttgcattatttcctttttgcatatttaccttttgcatagttttacttgggtgcagagtttttatgtcatctttttcacttagatacatgtcatgcctatttcttcacattgctatgtggtcattatcacaataacttttcaaggttgcataatggcctctattgtggccatatcatagaacctaaatatattccaggtgttggagatttaagtttctttcaattttttaaaaatcataaataatgttataatgaacacttttgtgttcgtagcttttctggatcattttcttaggatatattcccaaaagtgaaattcctgtttcacacaatatgaccatagtaatgacttttgatatattgccagcctactttcccaaatgatcaaaccaattttttgcctccagcaatgtgtgaaagtgaagctttaccataccctggcctgtgatttctcatttttgttctattattagtgatccttgtattgttagcagtaaaatactagtacttcatagatgtatagaaatttagaaaacagttttggaatatcagacacctgagtcaaggttctctccacaaagaggaagaggagaactggtttgatgtttgggttagtcatgcctagaaggataggagaaaagctctccatggcttgttaaacacattagttgaagaaatttatatttgtctgaaattagtgtgtgtgatgtcatctagctgaccatttatacctccttagagaattgttttgcccttttattctggaagaaaccggttcacaaaaaaaccgctgcatttatttctttgctttctaagaatctaaactgatatgagtcttgcaacacagttttctgcttatgaaatattttggctttatcttggagaatcacataattccatttttttctttttctttttcttttcttttttctttttttttttttttttttgagacagagtctcgcccagttgcccaggctggactgcaatggctcgatctcggctcactgcaacctccgcctcccgggtccaaatgactctcctgcctcagcctcccaagtagctgggattacaggtgcctgccaccacacccagctaatttttgtatttttagtagagacggggatttcaccatgttgatcaggctggtctcgaactcctgacctcatgatccacccgcctcagcctcccaaagtgctggtactacaggcatgagccactgtgcccagcctgagccactgcacctggcccatttttttcataattaaataatttatcccttagaagagttaagtcatctactttcagatgttcctgcaaacggagggctttgttctggcattggtcaaccaaagctctaggtaaaatggctagaaccttcctctacaagtaagagtgaatagaggctttggaaagaaattcagtctgagacaagagctgagaaacatggtagaattttagattagcatgattttaatagtaatgggctgggagtggtgctcacacctgtaatcccagtactttgggaggaaaagtcaggaggatcacttgaggccaggagttcaagactggcctggtcaacatagcaagactctgtccctatttaaaaaaaaattaattagcctggtatggtggcatgcaactgtagtttagctacttaagaggctgaggcagaaagatcacttgagcccggaagttcaaggctgcagtgagctttgatggtgtaccagcttgggcaacagagtgagaccctgtctcttaaaaaaagtaattttttattctacagcactgaatagtttcaaaatatcttttcattcactgtctcaccagtgaagttagtaaaatgagagagatgattaacacgcagagaatttaagggacaaacccaagtaagggcccatgagcacaggatgagtaagggtgtgcctgtgtggtatggactggactgtacctaaggctttggctgcaaatctttgtctggttttactttaccacagaacagtatttttaacatctcctccttcattcatacaaaaatttattggctttccgctatacctgctctggcacaaatttcagccttccatgagggctcagtctggcaccagagtcaggtttgcaaagaggccatggtgagggagtgtggtgaatgctggatccccgtgagggaaggctgcagctcatgctggtggtgcaggtggcactggagccggatccctgaagggtcaaaaggggtgagccctgtggatttctttgactttcaccagtgagggtcaatgagattgttaagaaagcaaaacaacacagatgttgtcttgagataataatgtcttctatgggggctggaaggggaagactacttccttctactgcagagttgctccatgctgctttcttccacagacctactttgtatgaaatgctcccatttctcaggtgttttccttccttgatccccttctaacaatggcctcctgaggttccacattttcttttatgccagtttattcattttctcattcattaatccaaaagatatactgagtgctagaatctaatgagaaagagcagagctattgaaaatttgaagcaaggccaggctcagtggctcatgcctgtgatcatagcactttgggaggccgaggaaggcggatcacctgaggtcaggaattcgagaccagcctgaccatggagaaaccccatctctactaaaaatataaaaaattatctgggcgtggtgacacctgcctgtaatcccagctactcaggaggctaaggcaggagaatcgcttgaacccaggaggcggaggttgtggtgagccgaaatggcgccattgcactcaacgctgggcaacaagaacgaaactccatctcaaaaacagaaagaaagaaagaaaatttgaagcaaaagccttctgaattgcaaagaccatgaggaggaaatagcttggcatgttctcggaacagaaataaggactttgaagctagaaatgagggtgtattaggagatgacatcagacagcagggagggtccagaccttggtaggaagtttagaatttattctaagtgcaacaggaagccatgggaggagggttttaaacagaagacaggatctgatttatctatcattttaattttgtaatttagaaaattttaagaaaagtgcatgttagcaaagtttggtgcttgatacacggacaatttggataatggctttagattgaagaaaggttaggaaagagttgctatttaaagaaggggggtgaccccaggatttatttcacacccacatgtttgcttttctctgttcttagctcagtccatatgaccaactgctagtttaggagagaagggtttagcagggattcccctcttccctccaattctcttagaccctgttttcttattaaaagatttgcaggatcccatctcggtcagtgatgtcagcaacccagccattatggtgagctgatgccatgctcatgaagaaaatgaagatcagctgattgacttccaagtatttctgccctaagccacgccaatcacttctttataccgtcttatcttttaatctcttgtctttctcactaagttgtagcaggtgggagaaatgttccaagaccattaaaggaggataattgggaatctctgtatagacatttaaagttgaataagcagcagtttattcggctgcctggtgctcagaggcacaccagtagcatccaaagagcaccctgagttcgaaggagtcggagaggtgggacaggaggaagggtgtcttcaataaagtgaattcaggctcttagacattctgttgagaatggaaactgtgatttttagtagctacattctgatatttacaatcaggtcttcattaatctgccatttcacggcttcatttagtttaagtaagtatgtggaaggtacacaatcggacaagccatgagagactacattaccttcaatgtgtttattctatctgttttcttgagttgctttccaccttattacctctaagctagttacaattttttttcaacacacagctcatgtgtgtttgagaaggttgacctccctccctcctctgtgtatttattcataatgaggctccttggtaccccgtgtgtacctctttcagagatttgtggcacttaaccacgttctgggctagtattgttctctcttcccctttatactataagtttctcaaagattgagtttatagctgatttttgccttctcttatgcctaacgtatttttatatattgtatatatttgtactttaaaatttttattttggtggaaatctttgttgaaaaatctattatatactttaatgccacctaaggatgggagaaaatttgaatgttttcttttggacacaagataatcattgtgctctccagttgttatttttgactcttgaggtatttgggattatatctccttctactaaacacctcagagcatgcgacttctaaaacatgatttcagtattccctttgttgctgttgttgttgttttgagacagtgtcttgctccgtcgcctaggctggaatgcagtggcaccatcatagctcactgtagcctcaaactcctggagccaagcagtcctgcctcagcctcctgagcagctgagactataggtgcatgccacaatgcctggctaatttttgttgttgttattgagacggggtctagctatgttgcccaggctggtgtcaaatttctggcctcaagcaatcctcctgccttggcctcccaaagtgctgggattacagttatgagccaccacagccagcctcagttttcctttttgaaattattttgtatcttcctacttattctaactgatgctggtctattgcttggaggccaaaacttcactttatacaatttgtctgggaggggaattgaaggtcttttcacatatctactacaggctgagcatcctttgtgtaaaattcttgggatcagaagtgtttcaaaattcagtttttgggattttggaatatttgtgtatccataatgagatatcttgtgaatgagaaccaagtgtaaacatgaaattcatttgtttcagatataccttagacacatagcctgaaggtaattttatacaatacttaaataatttcatgcactaaagtttgtatacatttgaaccatcagaaagcaagagtatcaggtgtggaatcatttcagcactcaagtttcagattttggagcatttcagatttgggattttcagattagggatgctcaacctgtagaatgcaaaatacataagctttgtgacaggttgtcatgtaagagcacttttagctcaatggccaagccttgagccagcaagtagccagatatctgctgcatagagaagtatgtggttgctaggtgtctctcccatcaaccacaaggactctttccctaacttccttgatagaaaacattttaacagaagcaatcaccctcattcttcactcactcagctctgagagcaccaatctctaagctaggcatgcacttgcctcagagcctttgcactttccattttctctgcctagattgctcttttgccagatattctcatgccttgctccctcacttccctccggtttttttttttaaatatcgctgtctttcagatgccttccctgaccacttacacaaaatattaccaaccctcatcttcaacccaccatcctctcccactcatcctgtgtggtagatttttatagtaatgaatcatgcctccctgtgtccacactcctatgcagagggaaatttttgctcttttcatcaaaagataaagtacatttttccattctcttgaatctgttctggcttcatgacatgcttcaaacaatagactgtgacaccgtgatgtgcaaactctagagctttgctgtgtaacataggaacccttagacatatgtaaccatttgtatttaaatcacaattagataaaatttaaaatttagttcctcagctgtactagtcatatttcagatactaaataaacatatgtgactagcaggtaccatattggagagcaattagagacgacatagggagaaactgaggtaccccagacaataggcagtgatgatttccagacatgtgagtgaggctgttttgtcccgccctccccatccaagctgcaggatgactataacctcactagtaatcccaggtggtaccagccaaagaacaggtcaaattgccaacccacacaatcatgaaaaataattgtcattgttttaagctataagttttatataggtttgatacacagtcatgataatggaaacacccttcaattctaatgactgacagtaatttggaaaccatgccctaaggggttacctcatgggtgagaatgtcacaaaatgaggaagacagagtgaatccataccatccatgacagtcagatcagttccttatttatctaaaaagagaaaaggatatttgctattactaaaataaaaaccaactgcagactgaaatacttattaatagcacagacttagttttacatcaaaaaattactaccagcaatttgcaaagtagataatttaaaaatacagaactaactgaaatccattatttcagtttaagatgaacagattgggtgactttgttatatcttgctctgacatgttttgtaacattaaatacatagtatttaattctgagagcatttctcccataatttattatgctcaagcatttattgagtgctttctatatatgtctaggcaggtacagtagaggatttcagatgattaagacctgaaccttaccatgcaagaactcacaatttaatggaggggacagatgcatggtcaaaatatatgcacattaacacagtacaagctctgttagaggaataggaagtgctctagaaacactgaggtgggagcagccatcttgttattgcacatactgaacacacagaatgagctcttactttgcatatgcattggggataaagactagaaaagaaacaaattaggctgggtgcagtggcttacatctgtaatcccagcactttgggaggccaaggtgggtggattgcccaagctcaggagttcaaaaccaccctgggcaacatggtgaaaccctgtttctacaaaaacgtatgtaaaaaaaaaattggccaggcatggtggtgcatgcctgtaatcccagctacttgggaggctaaggcggcagaattgcttgagcccgggaggcagaggttgcagtgagccaagatcatgccactgcactccagcttgggcgacagagtgagactccatctcaaaaaaaaaaaaaaaaaaaagaaagaaaaaaaagaaacaaattacctagagaattgttttgtgtaaaaaacagaattattgttttattttaataataaccttgttgagatagtattcctgtatcataatatttacccatttaaagtgtgcaattcaggggcttttagtattttcacagagttgtgcaccattattgctatctagattcataacttttttttttttttttttttttttgagatggagtctcgctctgtcacccagcctggagtgcagtggcgcaatctcagcccactgcaacctctgcctcccgagttcaagtgattctcctgcctcagcctcccaagtagctgggactacaggcacccgccaccacgcctggctaatttttatatttttagtagagatggggtttcaccatattggccaggctggtcttgaactcctgaccttgtgatcctcccgcctcagcctcccaaagtgctgggattacaggcatgagccactgcgcctggcccataacttttttatattccaaaaagaacatccatacccataagcagtcactcctatccctcccctccctccccagttccccagccttaagcaacgagtaatctactttctgcctctctagacttgcctgtttgggacattgcatggtaatggaatcttacactatgccctttcatgtctagcttctttcaatgagcatgattttaaaattcttccatgttatagcacatatcagtatttcattcatttttattactgaataagatgtcattgtattatggatatatcacattttgtttatccattcagcagttgatggatatttgggttgtgtccatcttttggctattatgaataaggctactataaacattcatgtatgagtgtttatgtggacatgtttttctttttcttcggtatatacctatgtgtagaattgctgggtcatgttgacaactctgtgtttagcattttgaggacatgccaaactgatttccagagtggctgtgatatggtttggctctgtgtccccacccaaatctcactgaattgtaataatccccgcatgtcatgggagggacccagtgggaggtaattaaatcatgggggcaggtttttcccatgctgtttttgtgatagggaataagtctcacaagatctgatggttttataaaggagagttccccagcacatgctgtcttgcctcccgccatgtaagacgtccctttgctcttccttcgtcttctgcaatgattgtgaggcctccccagccatggggaactatgagtccattgaatctctttcctttgtaaattacccagtctcaggtatgtttttactagcagcgtgagaatggactaatacaggttgcaattttaccattccaccaacaagcatcaaggttcctgtttcttcacatcctcaccaaaagttgttattatctggaacagaactgttttgaatgaaaatataaactcattaaaacagaaaaattccaattatattatgttatatgcatttaaggtggcccatatatcagtcacgtgatattagaacttaaagctgaatgccactttgtagctctgtgtacaaaacagctcattggagtctaatgatcttatcattaatgttcaccaggtggttgggaaatgcaggttttcttttatgtctaattgagagagttaaagtgtgaaatgattatatgtataaaactgttgaaagttaaatctatttctgacatacaattaaatataattgaaataggacaaattgaataacaaaattaaatttacaaaacaggatatgaatggaaattatcatatgtatgctgctttgtaggatatttgggtggtgcattggcatgagggccagagccctgtatttgtacttacttggcatggttcccacctgcccaggcttgcctcctgtacttccctacattggcatatcaaaggagttcgcgagacattctccagccagcaccctgcgcagagaggatttctttttcttttttttttgttttctgaagcacggagtttaatgtggttaggaagcaaaatacaatctaagactcagacttgcttttaatgaatccaggagacctgacaatgatacattataaaaaacaaaaataaaaatctgacaataccccccaacttgtcagtggcttcccatagcccatgattgggttgagtgagtctcagtgcataggaagcagtgcagtggtctttgtggcctgacctccgcccacaccttcagcttcagctgctaccgctctctgagtactgaagtttttatagttccctgagggcgcacactgtgacactcctgcattctctgctagtgtttagtttcctttgctgggagtacctttccctctctgcaagactcaatttacgcaccacctcccccaggaagcattacagatcccccaaggctctactaggtcccagacatggcattagtctgggtgctttgtttaccatgctgaacaaaaacagaaaaagtccctggtctagtggagcttatattttatctaagagagggactaaacaagaaatatagaaatgtcacctcttttgcatagtagaaggtgccaggtctaggaaatacaaagatagttaagcagaataatgagaatgggaaatgtaggggatgagaaaggtggaatgctacattcaataaggtaggtgggtgggcctcaccttctagacagccttaaaaaggatgagggaatctgtgatatggctaaatctagggaaagagctttccaggcagagcaaacagacagccaaagagattactctattgtgagagtctccatgttaaacaaataaaattccatccataaaggaagttgataggttggttttccaaagtatcctttctatagaccaatatgtacatatttccatttcaatttttgaaatctaaaaagaagttccaagacaaatctctcctttgccctcttccctccccacacccctgcacaatgcacattttgtggactattaatagtctagaattcctaatcagaaattactgtacacctaagttgcacagatcatattgtcttctttctccaacaaaagatctggatttgcctgtaaaatatatgccccgtaatagttttatatttccagagggccagttctgcctctgctcttccttctctgagtcatttgcctttatgtcccgtcttctctcagtttttaatctttccacattattgcctattggtgttttctggttgatcttttgtgctaaattctaaatgccattgtgtgaattcttcctcctatttgataaaccagagtgaagacctgttctaagatcttcatcttctcttcagtggcttgcattaaatctgtacattcctggaacttccccttccccaggaagaaatctagcacaggccttgcacagcattttaagaatctttaccactcctgagccaggcgtggtggcccatgcctataatcccagcactttgggaggccaaggcgggcggatcacaaggtcaggagatcgagaccatcctggctaacacagtgaaatgccatctctactaaaaatacaaaaaaattagccagacgtggtgatggggccctgtagtcccagctactcaggaggctgaggcgggagaatggcgtgaacccaggaggtagaggtgaaggttacggtgagctgagatcgcaccactgcactccagcctgggcaacacagcgagactctgtctcaaaaaacaaaacaaacaaacaaaaaaacccaacaaactactccttgctgggtgtggtggctcacagctgtaatcccagcacttgggaggccaaggcaggtggatcacctgaggtctggagtttgagaccagcctggccaaccatggccaacatggtaaaatcccatctctattaaaagtagaaaaattagctgggtgcagtggcaggcacctgtaatcccagctacttgggaggctgaggcaggagaatcacttgaacctgagaggcagaggttgcaagtgagccaagattatgccacttcactccagcctgggtgacagagtaagactccatctcaaaaaaaaaaaaaaaaaaggaatgtttactgctcccatatttactgatttgatttggattttggaaatatcttgaccactaaaattaaaaaaaataattttgctatattacctgctggttttcactattttttaagtaacatgatttttcatgtcgttattatatatttttaggtgattatggaagtaaatgctaggaatatttttattcctctagagcttcttgctctaacaacataataatctaagttaaagaactggctcaagacttgtaaatgtgtatttttttggattaaaaatctttttttttccatttttcttgtatctctttttatttccatatattaaaactttaagtgccagatgtatataatctttttttttttttaatttcctgaatgtcacacatcctgcgatttcttcacaagctgcgtttgttaaataggagatgatggaaggtttgttatccccgcccccacccaccaacatagtcatttaatgctcatcagtgataattgctgtgtgaatttagttgatttgtgcttgcttcgctgtcagtctttggttttatggatctaggaaggacatataaatgtacctttgcattttagagaaagttttattttatcctatatcctgtgttacatcactatatcttaattgtggattttttggttcactttgctcgttcatttaaattttttatcaaagtaataattgtatagtttaaaaatcaaaataatatttacaatgcttacacacaaaaaaatagcatttttgtcactccgtctctcactagttcttgtcagctcttctcatccctccccacctgtgagggttaagctacactttggttagtccaagcacactttccagtatgcttaccatgttatgacttatctcctctatacacgagtaggaaaattatcagtaatagtggtttctagagtagtacttgaggagggtaacgggtggcgtgtgcatgcttcatggccttattcaatcaagcactctactcttgatttactgctaaatcctccttgaatctttagatttcctaaaggctatcatgagattttctggatatagaaaatgtagcccattagtctctgtcagcttcattaccagggtttttttgtgtgtatgttgcttagatccatatttttatataagataattattctggtatttctagattttttcattcttaccttttattgactatggaagaaaaggatctagcctgcaaatactgtagcatctcaacatagtgatgtcaaatactactaaaaatttagttgtcttcaaaaggaaagattttattcattctaacatataatgaaagttcagtattttagaaaataaaagtctgacttttcataataggttgccagggaactacaccgaaggcaaaatactagagccagtaggtggttatgtgtttaattttaagaggataacaacattaacaaattccatttggcaacagcgttaaaattgcacctgggaaaatcttcattactcttatcttgcagcagtcactgaaggagtttggttgtttttataggtgcaggggtgaaagtttagctccacttcaaggaacaaaggtgctaaagagaaactattctgagaatcatagatttgcatgaaaaacctcacaaaagaaaaatagtaattgcctcagcatgagagatggaacatattttaagataattggagactgttttatatgtgccctcattggtttatttttgatttcatgtatgtactttgtttctatcgcttcatttttttttcttaatgtattctaaataatgtaaaacccttctgaggatcttattgctacttgtgaaattacctttctctgtatcattggatgtaatttttttgtcagtcagtcttacaagaaaaaagtatcttagcaaaggctattatattttatcaatctgacatcagtgaaaatcctaaaagtacattttgtgtaaattcaaatacactgtaacaatttcccttaagtgaatattttaaagctgtttctttttttgtatacttaacgtttacagaaattatcttttttcctttgtatttttcttcattcatatctataaaatttacattttggcttctaacttagctgaaatgcttgctattagtcattttcttgctaagtgtggtcagaagtggtatagttgaagatgtcccataatttggtgaacacgtgaggttacaaactcaacttttgcttctcttttgaaaggccctgagacgggagttaaaggagaaagaatattctgtcctgaatgctgtcgaccaggcccgagttttcttggctgatcagccaattgaggcccctgaagagccaagaagaaacctacaatcaaaaacaggtgagactggtttctccactacatcataaaaacacatgctaggagaacaaaaaacccaaaatcaagtaggaaatttccttacagcattttaggatctaatatttaaatcttttcttctaagtgttactttattcaaatatgtcattaattcacagatatctagattcttaaattaagaaaataaaatttttgtatacctcaatatcaattttaaaggaaattaactgcagaaaaaatagattgtctaaaaagtgtactgtaactataaaagtaatttctataagaaataaaaatttatattatatttaaacaagttacatgataaataattgcaagtagtagaaagttattaaaatataataaatatacaaaatatttcaaggtctataagtaagattacttttgataatgacacaccaaagtcctttcttttacaagcagacaacatttctttaatttaaaaataataccctgtgtgtttatttactttggcttaaaatttaaataataactaccttactagcaaatttactagcaaaaaatatatatttcttatatttaaacatgttatgtgataaataattgcaagtagaagacatttattaaaatataatagtaaatatataaaatatttaaatatctatatgtaaggttacttttaaaaatgagagaccaaatacttttcttttacaagcagacaacatttgtttaatttaaaaataacctgtaacatttatatactttagcttaaaattgaaatagtaactaccctactaacaaatagcaatatatcacatagtaaacttaagagaaaatgtgtaatgaattctgggtccaatatatatctgtattgtgatttttcactgctgacaataaaatcattctgatgcatttttaaaaataaacatgccattcaaaatcgtttttcatcattcacttcacatagtaacagcaaacctgaaagattgcctcatgctgtgtccagcagtgtaaatcatgaacatttattacttgtaagggaagcatagttagaaaatgctttctttgactataactggaactggatcagacatatggacaggtagccgttttcctactgaatcttactcaaggaaccttcttcagtccgaataaatttcccatcaagaccataatctttttgactctctgaaactagttgtatatatgtgtgtgtgtatatacacacatgtacacacacacacagcacacttaacttgtctagcatttctttttgttttctgctggtggtaacactgtctttccagttagcctcctacaaagctaagtcattgttgagtcttccacttttcaccaaatccagtggtctacaaatcactcataattattatttcttttctttttctttttttttgagacagagtctcactctaccacctaggctggagtgtagtggtgcgatctcggctcactgcaatctctgcctcccaggttcaagcaattctcatacctcagcttcccatatagctgggactacaggtgtccaccaccacgcccagctagttttcatatttttagtagagacgaggttttgccatgttggcaaggctggtcttgaactcttggcgtcaggtgatctgcctgcctcagcctcccaaagtgctgggattacagacgtaagccactacactcagccttatatttgttatttctatctttgaagaattattccttttgagtactctgttttatatatatatatatatatatatacatatatatatatatatatacacacatatatatatatatacacacatatatatatatacacatatatatatataaaaaatgtatacacacacacgtacatactcatgtgcacacacatactgccattaattccacattctcagccttttgtgtgtagacttagaatagttttaggcagaatctgttgctacttttggtagcattggtcccattgcattgttctgtcatctgtgtgcaacacgtagtatttgcccatatattctctctcttccactttagtctactactgataagtaaatcttatcatgtaatcatattcgtgtttctcccctgattatacatctttcttgactttccattgcatactgaaaaaaaatcttggcctccagcatgacatttattgtttcattttatgtcatgttatgttatgttatgttatgttatgttatgttatgttatgttatgttatgttatgttatgttatgttattttgagacagggttttgctctgttgtccaggctggagtgtagtggtgaaatcacggcccactgcacatcaacgtcccaggatcaagtgatcaatcctcccacctcagcctactgagtagctgagactaccacagactatcttttttaaaagtttttgtagagatggaatctcattgtgttgcctaggttggtcatgaactcctgggctcaagccatcttcccattttggtctccaaaagtgctgagaatacagccatgagccaccgtgcccagcctagcataatatttattttaaaaatctttggatcatcaccttgaatgcaaacatgcagcaattaggcatataattgagactactgattaaagcacacaaatgtgatttctgtgcacatatgttgcactctgaagatatcatttgctgagcttagggctattttgaatatagcacatttgatcaaatggaacacaatccttgtacattactgccatttggaaaacatactgcttttggccggacgcggtggcttacacttgtaatcccaggactttgggaggccgaggcaggcggatcatgaggtcaggagatggagaccatcctggctaacacggtgaaaccccgtctctactaaaatacaaaaaattagccaggtgtggtggtgcatgcctgcagtcccagctactcaggaggctgaggcaggggaatcgcttgaacccgggaggcagagattgcagttagctgagatagcaacccagcctggtgacagagtgaaactccatctcaaaaaaaaaaaaaaaaaaaactttgtaattgaagccctcctgatttttcaacaaattttttactaccatttttatagttccataaccaatctatactatctacttccttgaatgattttggaactgtcttgtcatggatgtgctaccttcccttcttccatcttttgaagttctttcaaaagaacattttaaggcttgcttatgtccttcatatacaatattagaatggttaagagccttagagatgaactagtccaaggctattcacttaacagatgagaaaactgaggtccatcgaggaaaaatgaactgctcaggtctcagcccagtcctgttggatatctaacatatgcagctattgtttgtattgattttcagatgttaaaattttcttacttgccctaagttgaggaatccagttttgagcattttataacctatgcaatgcctgtatatatcaggtactcaataaaagtttgatgaagagtacatgactacctgagtaaataagaggtataaagaaattcatttatttattattctgacttcatatacaacctattacaagaacatttttatgagctagatgcttaacaatgattcctctctcacccctcccctggccgccatcaccatatttaacaacaaggaaaatgagcccagatgtctcatgtaccccgtaaatatgtatacacttactgtgtacccacaaaaattttcaaaaaaggaaacaagccgaaactgtagagaattctttgaaagagttgaactcatcagtacttgcttttcctcacaatcttgagtctataaagaataactgtagatgggagaaactgatattatcagcagtagagtaattggattattgatttttaagatgaaatggaaataaaccccaacttttctagaatgagcactcaacatttacgaaattcctttcctatatctgtcaagaagcccctgccccctcccgtcaccctgagtccattcttccatcagtctttgcatcttacctcatgctcctccgtcttctgggttgctcgggctaaaatccactgggccgctcttggctcctttgtccttttgtcacccaaatccattctgtcagcaagtcctgtcatcactacattcaaaaggtacctagaatatgatcctttatcaccacgtctactatgctttcctggtctaagcccccactaccccttggatgattgcaggttccttcaactcatctgcctgctctgcctttgctcccttattagagatttccaacacaatagctgtaaggaccatttgaatatataagtcatgtcatgtgactcagagaagtcagattcttataatggctcacagactgtatgccagggggtgccatgttacatttctgacctggtctcttattattgtccctttcgttccactccctgtagatgtaagctccttgaagacagagggttatttttttttcactgctgtattttgtaatatttagaatactatctggcacatagtaagtgcttattacatagtgtttgaaagaatacgcatgagctgagcactgtccaagatggataaagaagtataacgcatgttcctgaggtttcaatttagtgggagatcaaaactagcacagagcgtgagaaagcaagcaatgtaaaagtgtccgtagtcatgcactcagttgtgtcctgaggattctaagtgatgcgggcattccaggagagaaggactctgagggtcagagtggagagaggttgattcctgagctagtcttaggggtatggacaggtaggaagtgattaagttcgggaaagaggaatggccatgctggggacagaatccttagcagaacagctcagccataaggaaagagcagctgtattttggggagtcagtagacagcctggcctggttgccagagtcttgtgcctggacggcagatggggatgagatggttgtatgtgctgaatggttcagaggacctggaaaggtcctacagaggacctggaaagtcaggcagaacattgtaacttcatacaacaagaaagaaggtgctagtacagttttgtttttttaagcttggggaaaaaaataagaagttcacttgtctcatcttatccaatttaaaatctaccttcagtcagcttttcttgtctcctttcttccctaggactttgcgaagtttataaaaagctactttaaagcagtacaaagtgttacatcactaaaacgccacattattctggactcttctcagtggtcagtcatttaagggttaaaacgatattgtataatttaaaaaaaagtttcatgaacattctagtcatgcgtcattcatagtgttggtgaggaagtcatttgggcacacatgtttcaaatccctaataaaatgtctagaaagatacacagaaaaaaaaaatactggtttttgagttcttattttactgtgacattcaggatgttttaagctccatgtttttaatactacatttggggggacaagaaaaaaagaagtcatgtcaatttaactttatggttttttttgttgttgtttgtttatgattagcaattttcatactgcctcctttcctgatactattttctataacaatggctggttttacttgttaaaaataaatcgaagaaaactatccataatagcttttatacttttgttgtttaccatgacttatgtacatctgctattagaagtagcaagcatttgaacattagttatcctgtttgatgccgaagtactcaatgttggagaggttagatcaggaagaaatcaagtgatttttttcggttctatttaataagcattttgtgagtatgtgatgtgtaccatgctataaggacataccaagatggagtcacctcttttcttttaggtaaccattctagaaaacactttcctccatgatttttatctccaatgcctttttttcttccagttcctttaaattttttccattactaattatcttatactgttgtatgtatttttaagtatttaaaaatcactattaattgaccattccacattagtttcctccataccaatcttatgctaggcctatttcaatatattcttaattggcatttctccattaacataaatcctaaaatgataaacctaaagcacaaacctggcatgaggtttcctggagataaaaactgcccgtagtgcatgccatgggatctgagctcctccacctggcacagaaggctgcacagcaatttgtcctcagcttttccatccggccccaccttgtgcctctcttcactccactcttgaggtttgctgggagccaggctcctcactacattctgcaggtagtggtcttccttgcctttgccccattgcccatcccagttttctgcctgtaggtcctctgacctgatttccaacgcttgcctcatttgcccacgcagctgctggtcatcctgccggctctgctggggctttgtgtcttcctggacgctttcccttcccgagctctctgccatgattccctggcaccctgtggtctctctcactgtgttttccaatgtctgtgtctgaagcttggcccttccctctttttttagtgattaccctcattgatggagagtctgaaagagtgtaaaaaaatgatctgagcagccaggatagagattgtatggaaaacatagtgcagatccttttcttagatcatgggaaagccactgaagtacttctcagaggtattaacttctgctgtagacactggtgcgactgtatgaacttgatgtccggtgagtgatgggtaagtagcaaaatgaagtgacaggacagggacaaagattaatggtaagaaatgactccagctgtctgacagcaatgaggagaaagaaatgataaaaagatatgcaagaatcctaaaataaaacaaaacgaggtagtctttgggactttcaacagtaaaagaaaactgaagctgtgaattatggtgtgtgtatttctgaagacagaatataaatcagttaagagaaggcataggaatttatattatattttagtaaattttcttccaaaatggtaaccataaaaaaatagggctaaatgggtaaaatgtagctctttggaaaactcaactactcagatttctgcttataaatggctattaagtaaatatgatttttagctgaactaaaattatctgaatccttgtagaaattttaccaagttcacaactttgtcagtagtccctgacttttgtttgagcaatatggaaatacttaatttcatttaatttgtatcatgtcaatgtatactttttccttttaatgcaattgaactgttttttttttttattttaatccctagtttgtatgtgttagaaagtatcacagtacaacaatctctcatcctttgcattgttctttgtactttccaagcaactttcatattcattctcctgtctatcccaatgagttgagccgatcatacagtatgattttttttaaaaataaaaacacaaaggccaagaagatattatggtgctgaccaaagtcatccagctaacgaaaggtagatgcaagaacagagccctatgcgtctatgacaatgacttccttaacctctggattttggctggcttttgactcatcccttcgattttatctcctctatctgtgttcactgacggccatctggcccctaacttcctagctcctccttgatctcaatgtctagagcctcttaaacttgcatccatgttttctggtctctcccttgtgctgccagcctcccctggctgttctcagtaccagatcagaattcctgtgtgaaccacactgctgcacagtgaagctgtgcaagacaacagccttcacccacccctacccccaaacctccagagggaattagggaatatttgtgccttctctcctgttcattaccttcagttcagtttaaaagtcagatctgcacaggggagttggagccttctgtcggtcttcctctctccataccacatacagatgcaggcaggcaggcacgcacatgcacaagcaccccccaccaaacatactttatgatttaaagctaaggtatcaatcactaaataaaactgctaacaattttataggctatctcacctctaaatgtgtttagaaaattacacaattcattgtatacatatgtatggagaaaacacctgtcctcttcttgtgatatttttagattaaaaaagagattgcattatttatccaccagtttcctcaggaatcatctttaaaaattattccagttaaagaattactgttactacaactactattttatttaagctgcctgaatatcatttctgtttcagcctggagcagtcaattttgcttaatttaaatattttattaataatcatagaaaaacccagctattacttaatttagtctatttgtgcatgtatagttgagtatagtgggtatagttgtgtatgtgtgtatgtgcatatacaactttatatagttgtgtatgaatgtatatgtgatgaatagttaataataatttttcagatgaaaaagtatgtatgggttaatgttttcctctttggtcctttgacagatggctatgtatatttagtacataatatggtatgtaatatttaactcagggtatactgtttaatttttaaatatttcctgatattttagaaagccaagtattaagactatttttcttccctgtaaaatctcatatattttgtgatacaacgaagaatttataagtgacatattcagtccactatgtcagtccactttatgccagtattagcaaacttatgcaaatacaatttcatagttattaaatgagtgaagatttgaaattattatatagtttagtagaagttacttttatattctccatataacttaaggttacaacattattttcttgtatgtaataaaatgaggacaaattacacattagttaatagaagtaactgggctagtaaaactaatgggtgttttctcccagggcttttgttttcctcactaacaactttattaattggagcctcattcattgtaaatgacaggcacacagcttccctaagtgtaggcatgaaggggaaggcattggcctccataaccgagccacggtagagacgtagctgaccacagggactggaataccacccagaaggcttttctccatgtcttcttctctgcttctctgtacaggttttcattttcttagctttcctatgactgtatagctcacaacctcataccaggaagggctcacccttctttagatccagaatattccaggagagggctctggttgacttggcccgagtaacatgggactcagggactgctaggattggcagaccttcttcataatatcatgctaaatggaggaagaatccaatcccataaaggaaggggaaagtgaaaaatggtagtaaatgcagacattcccaacaagccagaatttcacaggtgctgaccatgtgccacacactgtgccaagaaacttacctaccttgtttaattgcattctcataataattccttgaagggtgaatacttaccacccattctacagatgaggaaactgagagtctgagaggcttagaggcatactgtcttctatgtgacagagccaaaatacaaactaaggcttatgtcacaaaacttgatgctcttaactgccatagtgtactatcttaaactacttccgtaataattagtatttgtagctattcaatagaaacaacattttattttcattttcttcgattttaaaataattcacacagtaattgaatatgtttataactctttgcttttttctttattgttgctctttcttcactgaaataccacgctgcataatggaatcataaacagttcactgatttcctaacaccgagggagaaggtgtctaggcaatattagactttgtctttttaattttcatataaaaatttgaagtataagtaattgctttcaggcctatagaccacgacaataatttcattagcttctcaagtccaaattagattagtaaagttgtaatgcatgaaaaagcgcagaaaaatataatgttactttcttttccggtgttcttaactacagagcagtaatgtgatttttcacaaattaaagttctataatatctgtatgaatataatgcatctagtcttcaacttttctaaaatacaacgagccagctgagtaagcccatcgattgggtaaaaatttggaaaatgtttttcatgctaactcctactgtagtaataaaatctcatttaaataaacaatagtcttcatgaagaattatatgataaagatttgtttgatagacatagcattttcaattaattgtttaccatctgttatgttctctaatcagtgttacagccattcataaatcacatttgcctcataaaaagatggcaatcgtttacacgtgtgtattttattataatcagcatctgagacattactttctgatttaaacataaaggaccggaggatacaagactctttgagcgtggtataatgtacttatgttttgtgattgttgttgttcttagtagaaaactggaatcttccaagaattagaggttttgccattttttaagaagtataatcctagcaaaggcatgaattctcctcttcaattaaactcatcacttattttggcagtacataaacataagccatatttaacttataagaatggcagagcatgggtagaaagctccagacttctctgtagctcgatcaatcactaggggctgtgtttagctgggaagcagcctggggagagatgggcagtcatgtggcaagaaataaaagactttgaatctaaaactcctgtcctttgattcttgaaagagaaaggggagaattttcttctttattttctttttctagttaaagatattgtacagagattgatttatgcatttaacaagtacgttttgagtgcctaccatttacaaggggggtgttctagatactcgggatacagtagtaggcaaaacagatgtttttttcctcctgaaacattctcagcttttcctctttccttttattgccacctgcctgcccccagtgacccatctgttgatgtccagcccaaaggaattcacttgaataaatcgcaaaactgccactacttggaggaaattcagggattattcctgaatgaagaaaatggaaagatctcaggttgcttagcgaggccctggttgtctgttccagggtctctttgctcttcctgcttctttccttggagttgcgtctgtctagtggttggcccctgcttcttcctccactcaactctgggcttatttactttggccacttcacaagaagagtaaaccttgaatgtatttagactccagttctgcctctattgacttcaggtcagtggtgccatgtagctccctccaaagcgtgttttgtattctgagttccccttcatttgtgtcccctctcttaataacttgcatttactatttgtggaaggtagtccctaaatctgtttacttttgaggtcttgatgttccctaaatatatctaggttctcttttcttaaaaaaagaaaaaaaaagaatttgagaagtccactggcagcatggatgaatctatgccatctttatcatatctgtattgaaagatttaggctacatattaacaggtgaatctgctctgagtagcctcttgttattgtcatccttataatttattaaatggacataattagaagcactaatcagccgtggcacttgatgatgtacttgtaatctggctcataatgagtggttgtcatcagttattgtacagagtaggaaatggtcagggccctctcaaacactgattgaacatttcagagttattaaatggatcttaatcactttatcagaaaattaggaaataatgtatttcccaatattttaatcagaaacatcttttggtcatgaggaaagagagagagaaataggaggggggtaaagagagagagatattgagagagagcaagtcaagtcttttcctttgagttcttattggctaatcaacctggtttgcttatgtgaaaatctctacagatatctaagcctcccagagctagttataaaatagtaaaaaggaatgaaagagtaaccttcctcaagaacctactgtgtgccacacatgtgccagtagctttctatgtattaactgaggttgaaagagataaggaatatatctaggattatgtaactagttagtattggaactggcatgcaatctcctaatcttttcttctaccaaattgtccaacagtaaaaatgccagttgtgaatttttttctttacttgattgttttaatatttccttttcgtcttttggtagaataaaacaataagattatagatacatgcaaaaaagcaaatagtataaataaggtatttggaattaccatacctgaaatgactttgtaaggttgatccttctatttcacaatagtttttttgtaagtgctttacacagatgtgagaaggaggaagaaaaatgaagtgaaaatatgtccacttaaaagtgtaaagttgaatgttctcaataaagaggagcactaaaaattcaattccgtccaactcaattaagtaattatatactgaggacataccaatctctagactggctactataaaatcaatatggaaggaaagaaaacattcttgacattgggctttaaaacgtaagtgtagaaaagccacaatggagattacaaatgttgatatcataattgagaaaaaaacaccatacatatgggaaatgtttattaaacaataacactgggcgaattctaataaatatctatcattatttcatgggagaaacatagtttcatttttaaaatttaaaaaatagctttgcataagcactcaaaggaagagttttttttcctctactatcaagatttctttgagatatacagaggctcaaccttcttacataattgaattgaggtaaaatagactcttgaaataaaatatttttctagcatgagaaaatagggtttgcacttgataaaattgggctgggcaggtcaagtaactggcctaggggcaatgggcaaaatgggagcaggactgattccaaatcctagtctctgttcctggtccagctttggtttttcacctgcattctagggaagtgtattatagtcttcttcctcatggtataaaggagagcgtggcataaatgctgtgccactaatttgcatatttgaagaagtaaaggtaattggatgacagaaaacatcaggattgatctttcctttttcctctcttcctttgtcttcttcctgtttcttctttctaaaagatagttatctgtggtcccttaaatagctttgtaatgcaataaataaattggtgtttaaaaattatgaaatatgaatataaaataatattcataatacatgatacataaatatataatataaataaatataaaagtataagtaagaggctaggtgcggtggcttatgcctgtaatcttagccctttgggagactgaggtgggaggatcacatgaggccagaagtttgagaccagcctgggtaacatagtgagacctcatccctaaaaaaaaaaaaaaaaaattagctggccactgtggcacataactgtgatcccagctactcagaaagctgaggtgggaggatcacttgagcccaggagtttgatgctgtgagccaggcttatgctactgcacttcagctggggcaacagagcaagaccctgactaaaaaaaaaatggtgtatacatatatatatatatatgtgtgtgtgtgtgtgtgtgtgtgtgtgtgtgtataaaatttttaaatatatagatatataaaaattatgtataatatatacataattttacttatgtataatatatacataattttacttatgtataatatatacataattttacttatgtatattatacataaatatatatattttcttctgagtagttgagtgtatatgtacgtaatataattctaccctcaaattttggccagttcaatgggaagacccgaagggaggagaatggagagtgacagggcatacacacacacacacacacacacacatacacacacacacacacacacactttagagaataggaaagtgacataggaaaaaaaagtcttctgatctcagaattgctagcaaatttatttggttttctcctgctgtttcctctgtctctagcattagcctctattactgcctttcccaatgcaaattagattaccctcttatcactgagcttcatttgctctctggcctccagtatttagtgactgtgctctgtgttgacacaagaacccagtggagtggaaatgtcccgtaagcttcagctacatggtccagagaaatcaatttatatgccaataggctagccacattccatcctgacaacctgttagaaccacctggggagctttggcatctatctatccatgccagaccttacgctgaccagggaaatcactaccttttgggggagggttcctggattatcagccttaaaaactcactcagtccctcactgtgagggtcgtttctaacatgacaccggggttcttcactggtgaagcagattctctgcttctacttgtaggtggtccttagcatttaccacaaatacctattcagaaaatctcaagtaacatttgtcctttgattttcaaatgagagtacttttttttttaagaatgcaataatttccctttttttcatttttttctgccttttagatgtttgaatttatttattatttattttaccccaaatagtcataccttcatatttcacatgtcgcttcttcttatgtatttcacagacttctagaaagtttttgttttgttttttactttgctctgtgcttggcttaaagtatgcattcagctgagattgttgctgcactgggaaactcttattttgactcaaaagtgattcgttgatatgtttcctttctggcagacagatggtgaattgaacacagagcttttcttttcttctgagtagcttcttgagtggggattatgtaataaatactgcacaaggactgctcaatcaataaatttttacattaaggaaagataaaaacgtcagaggcagcagatgatgttttgtcacaagacaaagaacccatgggcctccctgtgccaagttatttaatgtctgacagaatgagtttttactttatctgaggaaaattaccataattaagttgtccgttctgaaatgagtagtgtatttctttttttacagtagtcaatgcttaagatatatttttgaaaaagcccaagtgacttattaacaaacacaggtgtttaatcataaaagttaccacctctcatgagactaagaatgatttttttatcttagacataacattttatatttatataaaatatatacaatataagtattatatattcatcattttttagatatcttttttttttcctgagatggaattttgctcttgttgcccagcctggagtacagtggcacattatcggctcactgcaacctctgcctcccggggtcaagcgattcttctgccttagcctgctgagcagctgggactacaggcatgcgctaccatacccagctaattttttcgtatttttaatagagacggggtttcatcatgttggccaggctggtctcaaactcctgacctcaggtaatccacctgccttggcctcccaaagtgcaggaattacaggcgtgagctaccgcacccagcctagatatcttaaaggtataaggatttaaataaagtttgtctttctaatgatacactggccttcagagagctgctttctcaagaagcctttgcaatcctgacatgttgcatgttttagggcttttctctgggctcctagacagttacttgaacctgtttctctaattcacttatttttttatttttatttttatttttttgagatggagtctcaactctggcacccaggcaatggcactgtgtcggctcactgcaacctccatctcctgggttcaagcaattctcctggcccagtctcctgagtagctgggattacaggcacccaccagcacacctggctagtttttatatttttagtagagatggggtttcgccatgttggccaggctggtctccaactcctgacctcaggtgatccacccacctcagcctcccaaagtgctgggattacaggcatgagctgccacacctggcctctaattcacttatgttctttatttatcttgtactggtatattcagcctatctaccagttgtgatgttttctcttcttccttcagttcagctgccaagagatttctgaagtttcctgtagacttccaccacttaagcagcacaacttgtagttctgcggttgctaaatatcaatgtctagaatttttttgaaatttagagagacaaacatatgtgttctgtcacctttgacttggcttttatataatatttaaataaagcaggcagaccaatttacactgaggatgaaagttacagtttaggagagcttgcttctgtgcattttatggtgaagttcatcttatgatgatcattttccaagtgatttggaacattttgaggtgaagtggaaattgctaatgtgatgtgtactgaaagatgagatgttatcacaaagaagaatgtgttttctgtctcaaattaatgtacagtttatgtcaattgcactgcctctttatttgcagtggacagttggataccaccatcaaaccagctagataggaaaggaggtattttaaggtgtagaagatagtgaggccccaggagtgtggagccatgctggagacctttctaagctgtcttgagaatttctcctcagtgttgactgcattcctctgcccttgctttaccagctccccatctcttatatttctgacccttggctttgaacttgactttgatttctgtctgtatcctttgcttctcctctggactgttccagcccacatcctgtggcctgtccatgtgttatgcttgctatttttatctgaaactctaagtttatttcaggcattgtggaagcccccttgctctattacaaacttaggatggtccttgaaatcttgctatcttcctgctaaaatgtctgtgggctgcagatgatgccctttattaaaactaaactgctaaacagccttagagagatgatcactatctaaggtatgttatttgtcttcagtatttatttttaggaacacaatacattaatcttattttctgagagtttttgcttataatttatagtcattcttcattaattatacttaccatttctcttgagaatactgaaatgaaaaagtgtctttggattttgtgtaactgaatttatgataaagaaaaattggtttatttcttgtgttatcttcttacatttcagtggctttagaaatatattaaagttcaaaaaccgggtcaatttattaatctcagtaactgttttattatccttttgagtgtgtgattaaatgtagcagagaattcatggatgaagtatggagaaattctttcttaccctggacaatttttaccctggagtaattttttcttactttttctccgtatttctcagtaacgatggtaacactcacacttggctattaagaatatataatcagacatccaaattattctttttcttttttttaatcacagaattaactcctgaggagagagcccaaaagattgccaaagccatgcgcaaacagtcttctgaagtcaaagaaaaatgggaaagtctaaatgctgtaactagcaattggcaaaagcaagtggacaaggcattggagaaactcagagacctgcagggagctatggatgacctggacgctgacatgaaggaggcagagtccgtgcggaatggctggaagcccgtgggagacttactcattgactcgctgcaggatcacattgaaaaaatcatggtcagcatcattgtctttgaaggatttttaagaaatgttttcttgttaaatataacacaaataaagagagccacgtatataaattgttataagggattgttacaaagccaacgccgctgcaaccccacccatcaggagtcaggacaggtgctttccatatgaccctcattggggttcattggaaccccctgcccccaaataacaactaatgcaacttttatgataatttacatttatttttattttttatccaactgtgcatctctagacaatgtagattaggtttacctatttttaaaaaatatttttaatccccagatttcccctctcttcctttttccttttcagtttatttgttaaagacactgaattgtttgttttgtattgattcccagagcctggattttgcagaattgtgtccatatggtatagtctccaggttcctctctactcggtatctcttgtaaattggtggatggagatagagatttaatcaaaagcacactcttttactgggaactctcatctataaattgtatcttattgtatattaatgaagaattagtttagctataaattctgtttgtagtaaggaattgcccaaagctatggatgttagacttatggttacctcccctttggttcccatattctagaacatctcctgaaaaaaaagttaataaaatttagacaataagagatataagagatggtttaaagtataccccaaatctcattgacagtgtagtcagataaaaataagtactgaattttgctaaatattattaaatatgtcaaaacaactggaaaacgaaatccttgggggtaatcaaataatgttaactgcctaaaattatcattaatcgttcttatttacagaatacacaccttctggcaggagaagggcttaggagtcacacctgccaacagacttccagttagcacctttgatactagcagatgttctgtttttatggcaaggaaggccacatagtcttttattctgttataggaaagtgcagtcataacatgataaataggttctttatgctagaacacacagcagttctgaaaccattttaaaacttgctttatctcgagccccttaatttggaagctcttcaaaaacaaaagataaactttcttgatagaaagactcctcattgccatataacacctgaccataaaaagaaaaacaaaaaccaaagaccttgtttgtcaaagctttttaaatgttttaacctgtggcttatatagggaaacattatttttggagaggaaaaatttgaatttcttttttgttccaaaagatttttaaagcctgtcttgaagttatattctatttgtttaaagtttactatcttttgaaataaaataggctattatttgaaattatatgcatctcaaaacattttctggcatttcatttttaatctttaatagataaaaataaaaagatgttgattttaaaagctaattacagttcttgagtcctccaaggtacctacccatggagagaatattaatgcatatagctaaaatcctgactaaagaaaccttgaaggatttgaattctgtaattgttctcaaactgaatctgagagacccagaccttttcaaagttcagactgaaaaatccctttgcccaccctaacccacccctcctccttccctgtgcttctatattaattgtgaattttttacacttataatgcctctattaccatacaactgctcttcttatttaattgtatttgtgtgtttttctgtgtgtgcacattctgtcatccattaaaatgccgaatctgcagcaatggaaaaaaaactatctcaactcttcttctccttccatactgaagcaattcccatgaatttgtatgcatcccttcctctaccctgtctttgaaatgttggtagctgcagggttcggtaatatttcttactttacacatgttgacttcaaacttccaacattcatagttctcaccctgactctagtctcttaaagagacttaaagagcctccccacttaaagagtggacaatgtagaaatgaggaaacctgagggcaaagctaatgggatgtttacaacacctactacttctaaatttagtttggtacattattaactataattttgtggccaatttaaatttaaactgttttcttttaatatcccagttccattatccattctgtgttagcttaatattgctcaaatatcatttttgtgggcctttgtcaatagaaattaattctgtctctcttggattgcaagttctgtgctgaatagtgagggtctattcccaagcagcttccattctttactgggaacgtcaagaatgtggatgctcataattacaatttctaagtgctcttagtaagttgttttaatgattctagaccttgctcagaggtggcatttgtcaattctaagactcatttaccttttttctgtagactccactcttcctgcccaagccctaaccacagacagtgattataaatgattttgacagggatagatcttacctcttgagtctgtaataggcattggtttcatggttaggaatgttgtttctactggccactttctaatttaattttaagtggaaacatgttaaaatcaagttgttgcatttggtgaaaaaatattaaggtagctatgttaaaacagaataaaaagaaaacacgaatacaaactaaagatagaatcaacattagatatcagtaaagtggaaaataatggcatacattttccagagtaaactgcatataatagaaagcatgaaaggaaatacataatcattttaaaagtttgaattataatttttctcttcacacatttatttatatttttgggtaataaacaatgactttttggttcttcatccaagttactgaagacctgaattaagtcagctgttgttgagtgggcaactgtagttgatttcctctgagctggccttgccatttatttggaagtacaattccaggaccccgcatgtaccaaaactcatgtatactcaagtcccacatttccccatggaacctgcatgtaggaaaagtcagctctccatatatatatgggtttcgcatcctgcaaatactgtattttccatatgtttggttgaaaaaaatctgtgcataaatggacccaggaagtttggttgagaaaaatctgtgcatatgtgaacccatgcagttcagacctaagttatttaaggatcaactgtattagcttttgttatattcgtttccaataatatattttttgttcttttcttctaggcatttagagaagaaattgcaccaatcaactttaaagttaaaacggtgaatgatttatccagtcagctgtctccacttgacctgcatccctctctaaagatgtctcgccagctagatgaccttaatatgcgatggaaacttttacaggtatcagcttattccccttcataatgcaggcttacaccttgggtggtctttaaaccctacctcactatattaccactcaccgttttctctttctttgctgatggtatttgataatgaatttagcatgtgatgacatcaggtatttgtctttcagtatcttgaacctaaaggcctcatttatttatagagtttaatttaattttttgatgtactattcatatgatatttgtagaaaattgcaaaaggttaaataaatcacagtaattgaaacctgtggtaggtcacagaaacatttttcacataatggctaataaaggagtcatttttcttactttcatcatgtattttttttttcattttgaaaaatcaggaaagtctctattgtttttcttctaactggttgctatttaaatatcttccttattttttccagatagcacatttataccagtggtgtttacctttagttcttagattttagctaatgcagttggtttaatgactctagaccttatttaaatatgcaattttgatgtagcacataaaaacatttgagagatatattttatctataataggtttgctgaattaattcaaatatcaaagcactcaatggttcatattttcttaatgaaattgaagaagtaagaaattagtgtacaatattttacaatcttagtctttgcaaagagtgttaataacctaggattagtaaagcaaaatctgttaaatttatgtgtttttctagtggatggaacatagaaatatttgttctttattctttttttttcttctgctctgtttctctaattcattatcttcatgtgatgattcttatggtccatcttgatttacttcccattctatttctgttatcaccatttccgaagattagaagtcggggaatatgttatacttgaaagaagatatgtattctgtcatccttatctatgatcctggtaacctctagagctcagatgttagttgctggttggaaaagaagagaaaaatctatgctggtgggcaacactgttgaattgcaggagtaatattttctttactcataaagtgtggcatttgaaggcttttaggccttaatgaacaaagtgcatactaatgcaatttaaatagctagccaggaggaactagtgctgtccagggaatcagacatacacagtttcatttaaggacagctgcaaatgagattgtccctctaagtggaacagtaactagcattacatgaccaaggctagaaaaaggaaatggaaatgtcagtaggctgtgtgcagttgttattgatttgcatttagtttctcagtttagtaaccctttacattttcataatgcagagaactaactatagaatgtgtatttttaaaaggctaggcatgggggctcttgcctgtaatcccaacattttgtgaggctgaggtgagagggttgcttgaggtcagaagtttgagaccagcctgggcaacataggaagagcctgtctctacaaaataaaaattaaaaaattacatatgtggtgtggtgtgcgtctgtagtcttagctacttgagagactgaggtgggaggatcacttgaggctaggagttcaaggttacagtgagctatgtttgtgccaccgcactccagcctgggcaacagagtgagaccctgtctttaaaaataaaacaaaaacaaagatgtggataaaagatgtagagtgtccaacctgggcagcatagtgagaccttgtctctaccaaaaaaaaaaaaaaaaattaacccggcatgattgcacatgcgtgtagtcccagctacctgggaggctaaggtgggaggattgcatgagcccaggaggtcgaggctgcagtaagccataatcgtgccactgaactccagcctgggcaacagagtgagactctgtctttacaaacaaaacaaaaccaaaaccaaaaatgtatattaaaaaaaatacgaagagtacattaatatgcctgtacaaactgaaatatatatctcaacccgaagtagagatgatcagatacaaatttggaggaaaataagatgttgcatactcacatgtcttttcattctctgtttatcttctaccacctcactcactctatccttctaactatccactatctatgtactgtctatttctctctctcactccccatatatatatataatctattatctatctaactatctagtttcctaggcttctttttcatttgctccccataacactttttaccatcttccttacaaaagagagatgagtggtcactgatcccatgaccacattttgactttagaggctttacaaacaatgtactgccttagaggcaatgcagagtaacagttagggcacagattctggcactgtatgaccagaatacgaacaggagtgttgccactcactagctttatatccttgggtacctctttgtgttttagtttcttaatctgtaagatgatgataaaaataacctttacagttattgtgaagactaaagcgttaatttctataaattgcttagaagagtacctggcactgtttactattatttgaggtcagaaggagtctttttttttttttttttttttaccattactctgataccagagacagagaaggggtccaaggggtctatataaacaatcatatcctgggcaatagcatcatttattatagtctttaaagcaaaaatattattaaagttattgtttcggaatcaaattatttcctctgacttgcatgtgtatgtgtgcaggtttctgtggatgatcgccttaaacagcttcaggaagcccacagagattttggaccatcctctcagcattttctctctagtaagtactaataaactggactgatcgcattaattgaatgaattagcattttctttcactttaattgaagaagccgtattccttgctataaatatgtttatttagatagatccttgtaaggaggtactaacatcaaagaaaatattgcttaatggttattatttgtaataacgtaatgacaactgagaagtcttcaaggtggaacagaaatgaactcatctttagctatggtttctcattggaatgtctgataactaacatagtatcatatcatcattgctttgtcataggcaaagattatgaactttttcataataaagaaatcagttttatcttttaaggttttaaattaatttttctgcttaaaatgtgcttatttaaaacacaccttcaactttcaaagtaaaaaaaatcactccccataaatctttaagtgggaagattttgatttattaggctcgctgcgattatatttagtttttctgctattcgagtattgcgtatgtagccaaaccacctatgcagaattttatgtaatatttttcaactggaattgataaatttatggactattcttgagatcttcaataaacaatttgagcttctactttatcattcactagtgaagatactaaagaatgtcggatttatagtcaaccagattgagtttaaacattcattctgtcgcttaccagacctgtgaatttctgaaggttgatttctttgtcttaaaataccgtattacctatttcctctgattgttttgagaactcaatgacaaggcatatcgaattacacaaagcacctagcacagttcttgacacaaatgctttcaataaatattaattcctttcctttcatttcctttagcaaatatatgtaagaaagcaatttgtttcatttaattcaatttaagtaaactttaaaacttagggcaaagcttatttctcaattatgacagtttttttgcaactataaccatagaaacagctaaaaagtactatatcttctaactaaattgattacatttatatttcctcttaatgtttttgtcactcttgataaactgccttacctcagttaaaggttgggcttttcttttacaatttcaagaatcttaatcagtcattttctgccccttcctgccctacacctctctacctctcaccctcctcactgcccccacccctacctcaactccatacagtttttctgtttcacaaaccttagaccttaggtagttaatctttggtatacgccttcctggaatatactgtgtacctagatgccaggacacatttttaaagtccagataccatcaatgttgatgaagtaaataggtttgctgtatacttattagattattaagtattccagatttctaaagctcagtttttcaaaatgtaaagctatgtaccaagaccaaatgaaagaggaatttacaaaataattgagactgtctttacagttctaactatcagttatctttaatattgatgaaatgctatactttcacctagcaatcactctcatagtggaaatcaagcacatattcttttggaagtgaaatattgtgaaatttatacacatttttgtaaaagtcaaatacatggccttgtattatctaacactgagaatccaaggaggtagaagttattcaaatcaaaacaattattaaaatgagtggggaagtgtaaacaaagtcccaattaatacatttaataattgttatcctttgctgcttggaatctttggctttattatatttcttggacttcagccatggttataaaagaagcctgtttagttaggcacaaaataaaaactgacctattagcctggtgccaacactgaaatgaggttggctctaatgagaaatgtaacatacctacttcctcattttcatccctgtttatactttggtgggcatagattgagaacagagtgcttgccttttataaagagaggaggaattgttgagtagaagaattgctcagctagtgttcagaaattgagatcacatctgagctcgaccgtttatttactggctgtcactctttgggcaagttattttatctctacacatttagttcctcatctatcaaatggaactttaacgtgtatcttgctggcttccttaccgaaaacatatatttgaaaatgcttggcaaagtttagaatgctgaatagttgtaagatattaatgtgacatgaaattgagaaaaaaagtattggtgacaactggctacgtgaggatctgatgatatttgcaaagtatgaaaattccaagtattatttgaatttttatatttgttcatttagcaaaattcttttatggcactaaattcacatgtactattcttcttaaataagtcttaaaataattggttaatgtaggaataatatattttttataagtaagaagtaactagaattgtaaaaaaaaaaaaaaaaaaagtacctcaatttaaaaaccccataaaatctcagtcatagtaaggtctagtgcaaaagtaggagactgggctctctgtatgtttcagatgaaagtaagaaattgggatttttctgcctagacgattgccttggttcttcacaactttttgcctatttttaaattccttctttttaaatgttatagaattgaatttacttaaatgccatctgtactcaatagctactcctgtgactacgatgcaaagtaaacaatgttattagtcatctggaaaattcggtcttgaaaaatctaatttttaatctggatataccaggtaaaattaattttggttttagctttatcaaaaatatatatggagtacagtttccagatggcactaaggtttaaactgtagtatttataagcaacaccatttgaaagtttaaaagtatttttatcaacaggttagattagttggcattagaccttgaacctgtattgtttcttgttttacttcaaatgaatccttaaagccattttttgtttggcccagtggatctcataattataggaatccagctcagaaaccagagcagttcattgaatttgctataaaatgttcagttgttttgcattaaggtgtaaggctttttggtttccaacgtttccaataatctccctttgtttcctcagcgtcagtccagctgccgtggcaaagatccatttcacataataaagtgccctattacatcaagtaagttgattttaattctcctttatgataccaagaaaatcatgttttattgataacttaagaggcttctctccccataacttttaaaaatagaattcagtcctattatctgaaagaaactgtgatatagttaatattaaaaagaaactacttttaacatgagaattatatttttcatgtatcagattagggatataggtgtgtttagctgatatattttaaagtagagatttaaatatttggagacagacaataagctatgatggccatactgtattccagcctggacaacaaagcaagatccagtctctaaaaagtaaaaaaaaaaaaaattggagaaaaatgacagaatttcaaaatactcttgacataatgatatttgtcaaattgtacaaattctaaaccatttttcttcctctaagaaaatccatataaaaatgtcttatactcttgtcattttattccaccaataagaaataatgatttatcatgaaaaagtgaaatattgtcaagtttttctttgtcttatagaagttatctgcattattagcataggctcatcattctttgattctgttgtccagttagtttctccttcttgcatactgtttcttcttcttatatgacattttataagttttgtataatttacacaggctcttagtaggcgttgatccttggcttagggctatatattgtcatggaacagaatgataaaattctacttctatagtcccttggagtgtaacttagtaaagatattaatttacaacgtgctctagtgatgagtcatagttgaccctattttatgtgtcagacgaacagcatcataatcatgacaacacttacttattgtcaggagacagctctgtctcaggttagctgtgtgacctcaggtaagtcagatgaagatctctgggccaagtttcctttttatcatttctaacatggggtgtggtatctccaaaatctatacaaatgctaataatctgctcttccagtatacttcctgaaaacgttgtgtgaagtccatgttggtgaaatagtcttttcttataattttttattacagtctgagatgtaagctcagggtaaaaaacaggtttgcataatatataataaatataataagcaatatacgttacattagcttatgggagtttaatatttttatcagtgtataacctacaatgcactgagttgtgaactgagttgagaacaaggtattaaagcaattgattggtgtcaaatttgcccaagtaagaatggaaagaggtcagacgctggttaagttggcatgtctctagtgaaagaagatgtgattatctaactgaaaatgtttaaaactgtttacatttttattgtacactataacaataataatagtaatagtattagagaactttaatttgcttggttgaatattgacttgaatttaatcttacaaatttagatataaatctgatgtactgtggtaggcaaaataataactgctcccaacccctgaaagatgctcacatcataatccctggaacctgtgaaaatgttaggttacaaagcaagggagaattaaggtcgtaaatggaattaaggttgcaaatcaactgacctttaattagggagattattctggattatcctgatgggcttaatgtaatcccaggggcctttaaaagtggcaggggaggcagagatttgagaatgctagctactagcttggaaggtaaaggaagcagacatgatccttaaatgcaggcagcttctagaagctggaaaaggcaaagaaatgggattctctcttagaacctccagagaaggaattcagccctgccaactttgattttatcccagggagacatttttgtaacagcaatagaaaattaatgcatgtactataaaaaaatcaagaagttcacgcaaattaattgaaattaattaatttattgaattgacttagagtcttttatcatctgatttttttaaaaatgcaaactggatctagtttttgggttttactaaataaaaaaaattaaatatcttgctttatgtttatatcatgattatctgtgtggtttgggacttttaaagtccatccttaattttagctcttttttaaaaatgaatttctatatgtttaggttaattatatatgactgagaattgtctaaatcagaatttctctaattcaaaatgtttataattttggaaggatctggtaggattgtattcttgttcttgtggggcagagttcttatggggcagattggtagaataaaagttagttttacctggcttcccattggctagagcactattaccagcactggaaaatagatataatataatgatggccactattttaaataataacgtttaggactgtagcatttaaaaaaatcttctccatcaccagtaaaagatcagattgtttaaaatatatgtagttttagtgttaaatgtcttttaagtcttccaaatttttagaaatgtgctcatttgtatatagcaaattcccattttcacaaaacttgtttaaccaggatctttcattgtgtaatttaacagtttatttcctcatgaagaaggaacatcaaattctgaaggtagagttataaaagccagtatttatgtgtgaagaattgttatgaaaacaaaatttaattcccaaattaataaccaagcaaatggagaatgaaaaagcttttaatatacacttccctttgcgtggcttcaaaagtagaagaaaaatgtttaaaacaaattttgcatgattgccatgcaatgagaatttcctggagcaaattagaatgtatatggctaacaaaaaataatattcaggtagaaatattcaacgtttttggtgtttaagtatatcatctttgtattcactgttagaatatggccagaaagttgaaaggagactaggaagggcaaattatttttatgtcatattttaattttatagatcacttaaagcccactttgatggcttcccactgcatttctgtctctctaggtaattccttattaatattttgaagtgcactgcggtggctccatggctcatgtgtttgtagaaaatgaaagaatataaatctgaactgaaagagtctatatagtataaacccctctatttgttgatatcttaagttaaaactagtctatatagtataaatccctctatttgttaatatcttaagttaaaactagtctatatagcataaacctctctatttgttaatatcttaagttaaaattaacatttgaaaattttatttgcttcctctaaggtagactttctgaaactgatctagttatttcttttttcctagtatagtgcaatgagagctcattgtattcagggtttaagaacatttaaaatggggccgggtgcagtggctcatgcttataatcctaatgcttgggaggctgaggcgggtggattgcttgcccccaggagttcaagaccagcctgagcaacatgacaaaaccccatctctacaaaaaattagctgggcatggtaacatgcgcctatagtcccagcagtcaggaggctgaggtgggaggatcacttgagcccgggaggtcaagactgcagtgagccatgatcacaccactgcactacagtctgggcaacagagtgaaactctgtctccttaaaaaataataataataataataaataaagagagagagaaaaagaaaatttaaaatggttcttgctgccttcacaatatacaaaaatctgccataaaagccagatatctctcattgtaaatttttggttatgtattttgcacaagttgttcatttcctcagataaaagtcaacttccagggaatatgaggaataagaggaatgaaagctttgggttcggttgaactttcttaatgcatcacattaaccatgtaaaattcaccatttctcagtttgccacagaaataataataacatataataatgataaatagttgctgtgggaagtaataatgatcattgtaataaattacatttttgaacagtcatttatttgccaggtgttgtgctgaatcttgtgcatagatgatctcttttaattctctcattagccaagtgaagtataggtactataattacccccatttacacataagtcttaatgaattatcaataactgcattaaaagtaattaataagcacgcttacagcttgcttgagattacacagctggtaaatagaagagctagtgttcaaacccagggattgtctacagctcctgaactcctgatcactatgcggtgctgtgtcctggccccaatattagttgagtcagaggacggaagtttttagtcccatggaaactttgaataggatgaaggattatatttaggaaggaggatagtagtggagaaagtatgagcaaacatcctttctttcataccatagacggttaccatttactatgcacctcctgtgtgccagcaactgagtccagctgtccaaggacaaagcccatgctttttccagtactccacactgccgttgtataggcttttccataggctaatttctacaggaggatctattttctagatgtttaaagcagtttcacactgtggtctggtaatggacaaaggtgctttttcatagataggaagatgtcattcccacagtgcttgccagttggaccttgagaggaactctgaggtggggaaacacactctttggccttcctctatctttccccattcacatgatctgaagatttctgtcaactggtagatttaagtatctgcgagtaagatggccaacaaagctggcttataagtcctaagggacttgaaacacagatggttctctatacatccggcctgttggtaagtcacagtatttaatagaatttaataagatgtagttaggaaataagattttcctttttccttataacaccttctctaaagcctgagttgttgacttttcagtaagcctttagtcttgctacagatgactattctgttcttgtgacaaggtgtcaccatcacaatttaacaattctatagctcagtttttcccactggagtctgcagtgcagatgttaattcttcatagaaccctaaatacaatgtacaatatcacacaacacacagctttcattatgtacatattagtaatctctggttatatataccatgcatgtcacattttctaaaactgacattcctcaatattgcaagaaattaaccagcataaacttgtctatatctataaaatttgctgtcttacatttctttcccttgttctaactccccctctgagtggatccaaatgaagattatcctcaatttgttacatctctctttatacttttattttccattcttgtgcccattattgataatcctgcaaagctcttttagacctactctcatttcccaaggccaccctctacctgccctaatccttcagtaactgaaaggaattgaaatttgtaatagttgtaaaatcttggggagcgagtagttgatctttatcgcagtcatacagttcatttgcatagattgtatatacttgtcttggcagaactacatataccgtctagaggagagaattcatgcatacttctttagaagaattgtgcgccagcttaggcaatacagaagaaatagtccttccctaaatatggtcagagaggagtatcagcaaggcaatctccaaatactcagcctaacaggaaaatgaaagctaacaaagtgtgtgtaacagcaacaacgaagaattaacataaagcattttatcattaacggttatagaaaacttatcccagaacagaataaacccgtaacaaaggtataattaacaatgaaaaataaacatagctctctccaaaagggtccctacagcagtctttatttctcccttccctctttcgtgaagatgagggatggtatctttttggttccagttttttaagtaaagaactcttgggccgcactttgaatctctttcaagaactggagcttgtggttttggttttaatgataaagaagtaaatgaaatagaagcataagcaaaatgtactggagagtctgtctttctagtagtctgtgactctgtttttactgaaaataaatatttaaaactcactgggccaagtctgctgatggggaggtaagaacaaaattgctttatgaaagaatgtaagtaccttaggatcactaaacccctgggcttggaggggcttcagataaatgagcataagcataccttggctaactaaaaatctaaacagtagaaagcctgccctgcagcagccagcaaaccgtcactgggaagaaatcttatgtattactggtgtcctagttaattgaggtaatttaggtggaattgatattgtctttgagagacattaggtagttaaggacttaaaatatcaccttcactgccattagtctacatattgttgggccatgaagtagtattttggcttggaatcttctagattacccaactctattgcattatagtgacaccatcagccttactgggcaatttgatttttagggtaagggatgcagttagtaaagttctaccatacaatgtaggaaggatcactgtggggccatttagagaggaaaaaagatatctatactttataaagattaaatttttaaaactgccattgcaattagcaaaagtacagaagtaataatgtttaaaattgtaaaataaatagaaatatgctgattataaagtaaaataatacagtaaaagatttcatataaccatatagaaaaaaatagaagtaattaatcccttcttttaaaaatacataaaagaaagagataaagtagtaattttttttaataaaaagctaaaagctacaaatccagcttttaaaagcaaacttaaaggatacaatgatcccctcaactgttgtgggaacatagtcctggtgttaacaccttcagatgggggcatacaaggctccccagggccaatgcaacaacaaatgacctacaggaatttggctgatggtctgaatctccccagtttgagagtcacggagatgagggtagggttgggtgggaggtggggttccctatgaattctgggctcatgtagaaatattatcaagctagcagatcccctgggtttactgagtatttgcatgtttatatttccaagcaatttagtaccctcaagacaattatcacctgtccctcccctcgcacgtagacacatcagttttgatcattaattctactactttatttaaaaacaaacacaaataaactttgtcttattgttttgtaacaaatgttctagtagtcatacatgcaatattgacatcttatattttggggtgtatggtatggtagcctatttctatatagtcctttccatgtttgtatctttaaatctactcttgagtgtgaaattactttaagtgtattttgtttcagagacagggtctcactctgttgcccaggccagagtgcagtggtgcaaccatggctcattgcagtcttatactcctggcctcaagtgaacctcctgcctcagcctcctgagtagctgggactacaggtacatgccaccatgcccagctaattggactttttttagagatggagtcttgctatgttgcccaggctggtctcaaactcctgacctgaagcagtcctcctgctttggcctccccaaatgctgggattacagacatgagccactgtgcccagcttaaatgcattttatagtcaaatcctacggaattattcattatttacaatgttgtcttcctgcctcctgtcttcattatcatgagatactaatggcattttttaaggaagactctaaacttttgcagtacctattatcaaataggatcatatatcttatttgaattttggacagaattttttttttcttgaaattctgacctccacgcttcttttctcttaagttaatttttgtttctaaaagtatatctttggatttcctgcctttaaaagcttagaggacagtagacagtgtttgcgagtggatgaggaagttgaatataacctgaggaatatataagttattcctgcagctttctcacccactacctccatcctctccccaggggcttttccacacagacacacacacacccacacccacacccacacacacacaagcacgtgcacagagtgagaatcaatgttactgatgggggtactccacattcttcctatattctagtcttgggtgaaacaaggactgaaaagattataaattccaaagtaagtacaccacctctcagatctttaagaaggtgttactcaaataaatgttgtcatatcagattgccaacatttgttttcactcttcatactttaggcagttgaatgcaaaatcgattagttgggagctcgtgcttgattgctatatatatgtaacttctataagtgtacataaagtaaatgttaacagaacctgtattttgcctgtgtcaacttccttttctggagacttctggttttctcatagtacctcccaccttctaatacactgtataacttacttacagtgtttgtcgtctcttatttttccccatcctgaggcatggccactccacttggcaccatggagttcattgctaataattataggaccagtttgagtgcaggagaaaagttggaagccaaacagaagtggctggagtggtgaatgggacacgaggaagtagatatggtacagtactcattggtgaattttgcctgtgaaggagagaaaaaaggtgataactagcagaaaatgtagatttgaggtaggggtgtgtgtgtgtgtgtgtttaaggatggcacgtctgtaaacatttatattctacaaaggatagtcttcttgagagaggggttgacagtgcagcacaggaaatttttaagaaatcattgggaagaattggcctttaataagaagggggacaatttctcagttaaaggggagataggataacagactggcagttggagggaagtttcctgagttggtggtggagagagaaaggagtcctcatctagtagtatttaggttttcaatgaagcgtgagataaagtaaaatgatattaaggcagagaaataaaccagtttggggagagagatagcagtagtgaatttctgttttggagtttgggaaagcaagtttattagggaatatagtgcagttgccaggagttggacatttgaggtttgaaatcacatattttaaagtaaattgagtctgtctgttgagtgattttctccagttgtttttatccacagctgctcaggtccagagtaggcaagtaattgagctgatccaggcctgggatttgcaaggggtgagagagaagcaagggagatgaggttatttgtaatgattctaatgatagaccatggactcaaatttggacagattcatcaagaaatattttaaaaccttaattatgcaaatatacttccatatcaagagcttagcttaaaatgagactatctctgtttaaatcccatttctattacttactataggacctcagacaagctatctaagcactctctgccctagttttttccatctgtaagatggagacaatattgtcacccaagtcatagaattgtaatccaaatagaatttacacatagaaaaagtttatccaaaaaagtttacttggtacaaatcgagcactcaaatagcatgttattactgtgattaatatacatcctgacctagtatattttactttgcacagcaaagaagaaatatttttttctttgattgtcttatctcagagcaatatacatagttcttgtccccacatttgtatttttacttatctttagttttgttctgttatatgcctttataattataattggaatggaatgatatataacaaacctcacaaaatccagttataagcataaaattggatagctagtaacaaataagtatatttgggtaagtgttagtttttggagaaacaagttgccttctgatcatcctttaaggtttcatggaaaaatatgagaccactctaatgaggacaaatgggtttaagaagtatcttccacagagcagtcatttgcccagaaatcaagattttaccagcctatcaaaagtgcatgtcctttgctgttggttcattgtgttacatgttaggcagtattgcagcacaactttttttgttttatttgttggtgctacagtcttatattatttgtgttttactttctgtggcttatcagtgttatattgttatgaataataatagataggtggaaggatatactacttcttaaccttattggcttaatattttaataatgtccataaaatgcagagattatatgttatcccagctggggctcttcagagtaagggggcacttttaataattataccaggatgctgatatgtaattcctgtatacagtctagtataaagcaggatttatactgcttgaaggatagttttcaaaataggcaaaaatcttaactcttatacaaatacaaaaagagcatgtttcatttaactcatagtaagggaaccagtaagaagttataataggttccaaagagaatacaaaatgtcacatatttatagtgagattagggatgctaaaatgaatttacctctggatgcaaagctgacaaactggtcaatatccacaggacaataatcaattgcattccactgggcacaatttgcatttatatggacagaaatcatttgcattactatctgttttcttcagtttgcagagtttaaaatagctcagagataatttaagctttgcaggatacccactcattttttgcccacaacaaagaccttcacaatttttccctgcacaggcaaaactggatggctggccagcctagttacatgtcacatgttctcactattgtttgcttcatatgattttgtacttaactgttaattgctactttgttttttgttttgttttgtttttttttttttaattttattcttggatagattcccatggctgttgccttttaaagagaggatttttagtaataaaatcataattttattttagagcttatcaagctgcacaatatgaagtcccactccctgttcatatttgagattaattagaacccaagctgttgttattttgggggaaaatgctacttttattctgttttggttgcctactctgggagaacttcaggcattttggcaagaggagctgagctatctgcagctgttcaaatactttaagcctttgggttcattgtggattttgctttaaccctctcccccgacttaaaaaaaaaacagcagccaactgcattgcctgttttttttatttctgttgtttggtaagcagcagttatacttttgtaaccagaggctgtatttattttctgtgttggcagttctgcctaatgaatcaactggtattgaattcacaaagggagatgcccgttccctccctccatctgtttgccaaatgtgtgtgttccgtcagctctcagtagtggtttcactaaaaagagccattagcaagaggtgttcaccttgaattcttagtcctccgcctgactgagaaatagtggtattttcctcttgtgattccgtaggggttgtgtgaggtgaagacccacacctgtaattccagagaaagcatatttgttgtttaagtataacgtctggctctacattaccgatggctttagtttggttcttgagccttggtttgctccatcatgatgggatgtctgtctctggacagtactgttgtcgtggggattgaaattccctgaaagagaagacaagagatcaatgaaccctagtaggttctctcagactgggagcccatgatgccttactggaattgcattacctcctcagcaaatccttccatatttgttggtaatagggaggaaattctttttgagactctgcatttctgtaaagctctgagcctaatgatgaatagtaagaatttaggtcaaacaacttcagtacccggctccatggtcttttgagcaatttgtagtatcactaccatcaaaccgaaagggtggaatggttttgttggtgttcagtagtggaccatgaagtagaagtatttgtctctgcattggagtcaagaatctgggtagaggagcccgacaactttccatctctttccaagacagatcttcacattgtagttacattattttgtttgagatcttggaatttccaggatacatacccaattgctaatatttccgggatacgtacccaactgcaaatacacactttaaatatttttcaaaggtaagtatgagttatttggggtttttgttacctgtgtatatataacagtgatgatattcttttcccagtgacatgccccagtttttgatatattacataggcttgaaaaataatttctcttgaatttgattttatgaatgttgtaatatcactctcttaggtactatgctggttcatttagtttactaaatagttttataagaactaggtgtcatttaagaagtctttggagcactattaaatgttatgaatctaccctgacctagataaggggcagttaactctttttaaatgtaaggccactgacccaccaaagtcatgaactgtttacctaagaaacttaattgaagcattccatttatgttttaacctcaatttattaccccaaaacttccatctaacatatgaattagttttgaaatttacagaaaaagagaaagtataaaacttgcttttaaagtgaagaacatgaggaaaacaatttaatacatatagaaaataataatactggttaatgagaggaagctgagaagaggaacacagagtctaagtggcaagagacacttgcctgaggggagtggggaatccagatacacatgaagagaagaaagggtagatttgcactgaggaaagttcgactcaaggtagaagaggagggaggctctgtagattgtgggatgatgttattcagagttaaacttgtttctgcaatctttggaaatatgacgagacttttaaggtgtagtgactcccacagcactacttctgctgttggaggattcgttctgaatgataatctacatctgtttaacagatatgggtttattctggagcctgcattgatctggccacatcaagccaggaccgaagggttcatgacagtcacattttatatctaggttttaatttgtagtttcagttctgtttgaaataggcaaagcaaagatttcatttgtgtttttacaatgtagttgctcaaatgaaatttattattaaaaaatttttataaaaaacttttgtatagagatgaggtctcgctatgttgccaagctggtctcaaactcctgggctcccacctcaggctcccaaagtgttgggattatagatgtgaggcaccacacctggctaaaatttattattaatattttttatttttttgagacagtgtctcactctgtcacccaggctacagtgcagtgaaacgatctcggctcactgcaacctccacctcccagcttcaagcaattctcatgcctcaccctcctgagtagctaggactacaggcacccaccaccatacctggctaatttttgtatttttagtagcgatgggatttcatcatattggccaggcttgtctcaatctcctgacctcaagtgatccacctgcctcggcctcccaaagtgctgggattacaggaagagccactgcccctggccaatgtttcaaatgttaagtaacaattgggcattgggtttctgaatggttgataatgaggataattttgcatgtatttttaaaaatttgaaaaaaatcatttctacttgggtatttcgtttttggcctatatgaagttttttgattttttgtttatttttaaaattttaccttttttttccagccatcaaacacagaccacctgttgggaccatcctaaaatgaccgaactctttcaatcccttggtaagtgttattaatagtaataaattaacctaaacaactgagaaccggtttttttttttttttttttttttttttttttttttttaaggtggattctcgctgttgcccaggctggagtgcagtggcatgatctcggctcactgcaacctctgcctcccggattcaagcaattctcctgccttaggctcctgagtagctgggactacaggcgcccgccgccactcccagctaatttttcgtattttaatagagacagggttttactgtgttgcccaggctggtctcgaactcctgagctcaggcaatccacccgcctcggcctcccaaagtgctcccgtgagccactgtgcccggccgagaactgtatattgttaaataggagctaatcaccagcctttcttacatggcatattaatgttaaaagaatcatgtcattgacatttaaaagtagttaaatttctaagggcaatgcagtaaacaggtattgcctttcttaggagaattgtgtggtttgaaatcatgtgagccaaaaagagttgatttacagggaggaatgtaattgtagtttttacctccttcgtattgagtcatcttaaccttcagctttgcacgcaaaaaatatatatagatatacaattacaatatagccaactttaatccactgccttaaatttgcttttggctcactttttatttagtacgtgccatcaaattagctcacctagtttaaatttgtctaaattgttaaaagctaaattcatttttatataaaaatgcaagaaaacacagacgagaattccggttttgttttaatttctagtgcaatgtggctttcaacttattgtttaacctacttcctctggttggtccagcggtttttttaagttttctctttgggtagctaaggagatgctggagggaaaaacagcacccgaagcctccctctcccatttcaataaaaaggatgcccccttttttaatctctttaaatgttgggcttctgtgtgagtgtttttttttttggtgggtgaaggggcctgcaaaagttggacaaacaaaagacatagaactggtttgcttagtttgtaaaatgagggggcaaattttgatgatatctgagttttcttttaactctactaatctctgatactctgtctttaggggacaaagaaagaaattacaatatctattgtttccaaagagttgagtattggttgtaggatcatttgaaccagatctgcaaaagggcaggaaaaccaaatcaatcaggatgggaggagcatagaaataagatgagctccatgaatagtgaactggacagtgtggttggaagaaaatgaagtgtccttggggaagatgcccctggaggaaaatctcctttattgggaaaaaaaggaagggccctctgcctactgtgcagtgcatttaataagccatgtgacagctgtgctttctcttcatcaccttcctctttttcctaccaaagggctgaaaggggtggtaccttttctcacccatcataagggtcatggtgaccctcctataacaaaagacaggtcaaccagaaaagcacaagaaatttacttaatcaaagttttacctgacatgagaaccttcagaagactcaaagaaaacagggaaaagtgtctgtttttacacttagattgagtgaggaatggatgactgcattgaattgtgattggatgaaagggtataatttaatgataatagactgagaagggaattccagcaaggcctatctattcagattcttcttggcttctccctgcagcatattcctttcctctagggacaggatacctgtcacaggagaatcttcaggagagaagggagaaggtgacagtgaacttgctagattttatggcttgctttggggaagagaagttctagttttcatgacccaccttggggaaggggaattctggtttctatttatcactttggaaggagaaagagggtcaggagacaagagacccagaggtcagagagaccttactactgaggccttccagtctccttcatttcaaagtactcaacccaccatgttctgagccctgacacctgttgaaaatactttcttagaattttctctgtagcactgctttgagatgtatctcaacatggtgctaatgatcatttaacttttttcttaaatacgtgttggggaatttgggagaagactttttatttcaggcaaacataatattttttcatcatccaaagtaaccaaatacattctgggcattcaatatatattcaataataagcctatcttcaaattgtttctttttctatttcagctgacctgaataatgtacgtttttctgcctaccgtacagcaatcaaaatccgaagactacaaaaagcactatgttgtgagttattctaccaaagttaatcaatctgttacttgaattgcgttttttttttttccaagaggaagataaatgaagaggatggagtgtttgccaagttaatctggtcttcagtgtacctcactcaaggagttggttttgtttctataaatgttttattacttgccccatcagtgtgcagtactgaacacatgccattcttacttggagaacaaaattaaccaaaacacaggagtaatgtaaaaagctttttcaaaaattgtgctgccacccaatttaaaaggattaaatcaaagaaagtattaagtcatgtgttttcagtaccttttgcccatttggcaatgtagagttccagtttgtctcaataccactatatataaagaaacactaaaaaatcacattcctgatctaaatttgaactggcaccttaacaagtgagataaaaggctctattttcttttaaatatatcttgagacatttagtattatcaatgcatttttcctgtggaggatgtgttcagagtggaattctgtggcagtcctttcatcaaaaggatatttcctcccgcaaaataacctaaaattaagtagcagtgtgaatacttagcatatagatttatgctatctggattctatttgtggttgtagttctaatgattgagtctaccctaggccttgtcagatagttgatgtggaaagtgatatttacctgttcttttaagatagggtaaattgaaaagtttcaagtattcttctttgctaccttttgttaactgttaatatacgtctaggcagttcagtgatgctttgaaaattatgctttgaaaaatgatatgttaaggttgaaaaatctgctccttgaaagtcaatagaagttagcaataaattttaagctggctgcacgaagaattgaggaaagagaggtataatgtcattgagaaaaaatagcaatgcaaagcttgaaaataggaaaagcttaagctatgtatggaagagaagtctacagggctgaaagacacctccagatgaggcaatgcaaggaagaatgagatgaccttgacttttgcataatccacagagcctcaaagataattagcaggtggtagtagttgcagcaagtgttgcagaattacccggacaaagaaaagaaagccaccacgctctggctactgatcagtatgttgagcgaaaagagaataggaagtaaattacgaacacacaaaagggatgtttggtctgcgcaggagtccatggtgacagcagttttgaaagaggctcagctgcacatccaggatccagttgatgggtctggaagttcttctcaggcctgatgagctataaaatgaggacaaatgactcagccacaaaatttccattgacagaagactgctttttgtcattatgaacatggtcccagttttcgacaacacttatgggtggataagcatattaacacatttggtgttttcttctcttggttctttggattcctgaagaaaaaaaccccctcctcagctcttcccctcaaacctgagaggaacagaagggacgcttctccaacttctaaactaaacgagattggtaatgacaattaaacaactaaatgacagttagaaaagggctagattgtattggatttcaagtatatgaggtgcttttttcagagccaactgaccttcacttttcctacagccttctcccactgccctccagccaaggcctctgggccactcctggagctcatcagtttattattaatctgcttcttcctctcccttcctttcagtttactagaaataccctgaccctttctctgcactggcttgtaacccttttttcctcccaaatactgttaaagatttacctcttttggaaacatttacaagctaatcctacccgtctccacattttttcccagtagtttatgattgcctgtaatagcaggttctctcaccttagtgacaagtgcttgcctttgtgtgctcgaataatgtttggtggattgccccatctccactgtgaactactttaggtcatggctgtctctcattatgtgcaaatctccacccagcataaggcagagggcagtgtcattgttcattcatttgttgggctccaagattgtgcaggagataaaacactataaagagacttgattctcacactgaaggaactcatatttcgagaacgttgcacatggacccaatgccctgcttacaaaagattcctgctgccctcagaatggaatggtctttgcctggctcacctctctgtccacctccttccctctgctccaccggggcatcaccatttcatcatccacttagtgatagaaatggcaaactctgtattccattcctcctgcctaaaaagcacttgtcttagctctttgtataggttgatgcaaaaataattgcagtttttgccgttaaaagtaagttagggtatttcattaaaagtaatggcaaaaacctcaattacttttgcaccaacttaatccttctgttcttcccttggctgggacactcattcctgtaggtctcaatgttgtcgatcacctctcttttaatgaggttttctatggctcctcatagaactgttcttttccttacatgacacttctggtgcttggtttaggcactaaggcagagtgtcaatggtaatttttaatattctgtttattagttattgtttgcttctccatcatgggatggatgagtctgtgttcgtctctacttaggacctcatacaatttctggcacagagcaggggttgcttaggacacactgagtgaatgatttgagtttgaaggttatatagcagtactccagaagatgtgtccaaggagatttatagcagtacttttcatagtaaaactcattcagttttggcatatttataaatataatacagcaacaaaaatcaatgagctagtaatcagcatcaacatgatttaatcttagaactataaaattaaatgaaaaaattaaatggcagaaaaaaaatgtgtaccactctgttccatttatatgtagttcaaacccatgcaaaactaatgctatatacacttttaaaaactgaaagtgaaatacaaaggttaatggttaccccataattgtaagaggatgtaattaggcaggattcaaggagcttccaagatagtggtaacattctgtttttttcagctgtgtgatggactaatgggtatttgttctattattttcttttagaccacacatatgtattttctgttttcctttgtattttgattttgaaactttatgtgataggtaatagcagaaaagcaaaagggaagtatgttccgaggagggggagagtcctctcattatgaagaagaaggcaggcttccttgattagtgggcatatgagccaggctataaaaggcacctgggatttaggcatggggcagttaattggggataagaagggaaggagttatctgtgtgagaattaaggtgtagatggtgttcaaggaacattaagttatagagtctgaatggaatagcttagctattttgtccaatatccagaaatttccttaaagttaatttaggtcaatttgaacgtcatatttttcctgaaattcctttcggtttttttcctcaagttcttattgtgttgtatttcatgtttggatatttttcgttatagaatggggagccatgaggcattttctgtattgtgggagtttagagatagggccagaagtggaagtatgctttagggaatatctaagaaagaccaaagggcagagaacagagaatgggtaaatagttcaggtgaaggatgatcaaagctgagctggctgggagttgtaggaggggagatcagggtctggatttttaaggctgcctgaggaagaactgatgactcggggtattgggtagttggtaaattgtggcaggtagaagaaggaaggatgttaggatatttcacggtttgcagactggatttcatcatgacaagaaggccaggcctttatggggagaggttcctgaaagagaattatatagctcttgtagggatcagagcaatgggacatgggtcaagtgttgaggcaggagatcagcaggagaaaagagaatctggagccatccaaagagaagcaataatagaagtaagaggagtgagtgagggcctcaggctcacagaatgaaatgccagatgtgaaaccttgagctctgcctatatttctggggaagagaagataggggaaatgctaataataataataataataataataaaataaaaaaataaagaatggccacatagcttgacacctggagaagtgtcactgaagcccaagattggatgcttaacagtgttcattgttttgcagaacaggagaatgatgatgcatttctattccatcccctgtgccttgtatgtgggattaaagaaaaagtcagaaagttggatagaaaatgattatgctgtttgtttcatttaccacatgactgagctgtcatttgtctccctttgaaatgagaaaatcttaatcataattttctgtgatttaaatgtagtcagttctttaaaggtacctaaatgtgacacacttcaggaagatttacgcttgacttaggcactaagacaaagtgtcagagtaaatcactaaaaattgaagacatgatagtctgtgggatgtggcaaattagtgtcacagctacagagtgtataaccagggagacttcagaaagaaatgcaaggacagcctgatgcaggaaatgggctttttggaatttggtctgttgtcacctgatgccatgtggggatccaatagcagtgctgtgttactggcataattaatgttggaattcagaaaacttacagccttttggccatatttgaatatgttccttggtgtctgtggggagctgtagttccctagctactgccctttattaaacactttcctttgtcaggcactttgcttctgccctctagaggtttacaattgaaaactgtgtacagttgacccttgacacccaaaacttaacatgttaacagtcaattaacacatatttgatatgctatgtaatatatactcttattctacaacaaagtaagctagagaaaagaaaattttaagaaaatagtaaaagacaaaatatatttaatattcactaattggaagtgatcatcataaagggtcttcatccttgttgacttcatgttgattaatctgagggggaggaagaagaggagcagttggtgttgctgtctcaggggtaacagaggcagaaagggtagaggagaaaagagaggcaggcacgttcagtgcttaactttaattgaaaaaactccacgtgtaggtggaccctcacagttcaaactggcgctgttcaagcgtcaactgtacagggcaaagaaatgaggtaagaattacagtgaaaattccagatggttcttagtttttttctgacaccttctctaactcatatgaagcttatttgacttatttttgttattagcttaagtttaccaatgatacatttggcatctgaaggaaatggattggttcgttatccagacttgtatgttttatgtttatctctttaaaaaaaaaaaaagtcttccctgttgagttgtttttgaaatcattttactctgtatgggtttaaagcagttcttttaatttgtagataacttaaaaaataaataattctgtgttactcagacagctagcatggacacatttcatacatgtctttaaaaattcaaaattattagttattcagtggttacaaatggataaatacaaaggaagctatttgttcattttagttaactgtcaaaatatgtcatattttttgagagaacagtttttgcatcaggcgaagagaaagaagttggttttatatgtatataaccttattttttctctttgcctcttatttttcatgctaaaagttaaatatataacatatgtgtatatataaccaactattttctctttgcctcttatttttttaatgccaaaaagttaaaaaataagaaaaaataagattagagttcttctagtctaatttttttatgctaaaaggttaaatacagagacagagaaagaattttataaaaactgatgtctatgagcagaccttaaattaatgtggactctaattttccttactcagatgtttagatttagaagagtcatctccacactcaataaatgtatagatagatacatggtagtttgataatctgctttgtctctttgttttcagttagtgaatgaaagacttaaaattgattaaattaaaaaaaaatttgtcgttttcatctaaactcctccttcgggcctttgcgggcctccccttgggcagtgtgtgcctggaccatgcatttctcctgtctgtttcactgccggcaaacaccactcgtgtgtaagtcacgcatcacccacactgcagtccaccattccttagagcctctgggcttgagtgaattcttgccttttctcaagtacttctctaaacctggaattctttcctcacttcatgtggatctcttgtattttatccatttttcaaagcccatttcaaatcgcacctctccagggagccttttccagttgtctttcctctcctagaagtagtagctctagcagaaatttgcgtattcctctcatagggcatgtttactcctccttttagtaaagccatcagtatgtctttgagagcaggggctctgccttcacctcctgtgcacaccctcctggctctagccccagccatgcctaccatagatgttgtacacatgaagagtaaggatgggaacaaatttgtgaagaccaatggatgtgggggctgtctagtacttcttcttagctacaggtcacctctgtgtctagagtactgactgctctagtacttcttcttagctacaggtcacctctgtgtcagagcatcatcggaagtaaaccaggttagggccagtttgtgacaatcttatagatcgggcttgattcagcaggcagtggagagctgttatttttctataaaacctgttttttaatatggagcatcttcagtaaattttgtatgtaatgatgtacatgataaaagactgtttaagaacaattagtttggctgtgatacaaagaatgaagagagcagtgcacaggctgcttgcaggagttaagatgaggagagcagtgtaatatttgagatgcgctgccatttggagtagattgagagatttatgccttgctacatttaaaagcaaaaagagcctggcaaagggaaagccagaaaaagaaagtaggaataattaatattccaaagagcaaaaaatgagataagattgggaagcaacagagttcagattcaaaagtatgaaagtgtggtaaaatgtaagaatagaaatgtgtttgtttctttaaaagctgaaatttagctaaaaaggatagattcttaaattgaagaatcaagctaaatacttgagactagaaatgcctttgttgtgatgttgttatgtaatgtaatgtaatgtaatgactgtaaacattccttcttctctcctggttagtggatctcttagagttgagtacaacaaatgaaattttcaaacagcacaagttgaaccaaaatgaccagctcctcagtgttccagatgtcatcaactgtctgacaacaacttatgatggacttgagcaaatgcataaggacctggtcaacgttccactctgtgttgatatgtgtctcaattggttgctcaatgtctatgacacgtaagtttatattttttctcattaaaatacgatcactgaatgaaatatgttaatagaaaatgtctgatttttaagtgaattttttaataagtgctttcaaattactttcccagtggaaatatttatgtttgttgttgaaactgaatgattttacaaatcattgagcttcttaacaaacaatagaacagaaaagaatgtacatctttcattttaaaatgttgcttcaatttacaaagactgtcaaatttatagtattctttgccaaaatgctaggggaaacaatatagctaagtcctactttcttcttgtttcataatgtctcacagtatttcttttttcaaaataaaaaatcttctgtttattgttatgaattacagtaatttattagctcataataatctgctctacaatctttgtaatccaactgaagagtgatttgaatggccatgaacgaggtagtcttttaatatttgctttatttgcatagtggttatgtgtgtgtgtatatatatataatatatatatatatggtgttttaaataatttatgctacaggacactttaatatctgtcatttaattaggtactcactgttcataaagcacactctcaactcccagcataactcatttgccattaatttggcccttttgaatacgacagtacatttgtgaaatagtcagttctagaaagacctgctgtgggctgacatttctgaaacattaggaattactcattgttctggtgggaggttaaagtatgcaaagatgaaataagaaaactagaactgggctgggcacggtggctcccgcctgtaatcccagcactttgggtggccgaggtgggtggatcacctgaggttaggagttcgagaccagcctgaccaacgtggtgaaaccctgtctctactaaaaatacaaaaattagccaggcatcgtggcaggtgcctgtaatctcagctacttgggaggctgaggcaggagaatctcttgaactcaggaggcaaaggttgcagtgagctgagatcgtgccactccactccagtctgggtgacagtgcaagactctgtctcaaaaaaaaaaaaagaaaagaaaactagaactgttgttttgcctctcatgcccaaaaagttattatctattaattagctacatgaaaacttctatttaccaacctttgatttagagataaataagatagatgatcattcataaatgcacacattcaggagctgattggttctgtataggaagtaaataatgatgacagtagctttagcaatgagctgactaaaaatctggattttttttctattccttttagtttacatgtaataactgtacatatttatgaggtacacagtgatatttcaatacatgtatacagtttgtaaagatcaaatcagggaagttaaaatatccatcacctgaaatatttattacttctttatgttggaaacattcagaatcctctgttctatcttttgaacctgtgaaataaattattgtttactatattcaccctacagtgctatagaacactagaacttattccccctacctatatgtacttttgtaccaattaatgaaactttccctgtcctcctctctcgattttttttaattagagaagtattttatcttttagtgttcataaatatcataacaaagtctttctaaataatcagccactgtgtgcttgagggctcttaagaaacctgctgaagcatgagtctcagttaccataatgaatacgggatttgcgatatctctgtctgatattttttaatacatttcattttaatgcacattttaagttctcctagggtaaaatattaccattagccttaatccaccattaagttgctcttcaataatttgaatcctcagaagatgctttttcatagtaaattcaccaaaatagttggtcaaaggtgttttaactacaaaacctgtaacttaacttttacatcccaggaaaattgctaaattcatagaatacttaggaactccattcagtcctatagaatatggtagaggtatacatcttgaactacattttaaggaagaactggagaagaggttcagttgccttatattgtccatggctctgacacactgttttggttttctggggctgccataacaaagaatgatagactgaatggcttcaacaagagaaatttatttcctaacagttctagacactgagagtgtgagatgaaggtgtcggctgggttgagtctttatggaagccactctttctggtctgcagatgatcgtcttctccctgtgtcttcacatggtttttccttgtctgatgtgtgctcatctcctcttcctctaaggacaccagtcatatcagattatgacccactctaatgacctcattttaacttaattacatctttaaagaccctatctccaaatacagtcccattctgaggtactaggagttaggaccttaacctgtaaattttaggggacacagttcagtgcataatgcacacatatgctcttttcactggacagcccaaagggaatagtgccacttggttgggaggaagcagtgtgtgaaatgccgtgattcatattctagggagttaaatgttggcacagttccacttgcctccatcaaatgggaatatgtgggaaatgctacaatttgccactgtttctcatttagaaagacagtatcttgaaatttctcatttttcattttaaaggaaaaaaatctttcaggactaacctcccttctatgaaaaagaaagatggcaaagaccatgctggatcagaatggtgcccatgcagtgtagctttctatcttggagagagtattggggattaatctatggaaaaaacagttattcttatgacagtaatgtcagacggccagagctggttgcccaggtttctctaacaaccatgatttatttattaatctaaataatagttattaactcttttcaaccaataattttctttgagaatcagatagaaattactatctaccctccaattaggacattacagactcatacatctgtgaatctgaggaatggtaccttgttctaacacttctattcattcagccgtcctgacattcactcactaatcatatacccgtgactgccttctttcctggcatgtgatacagccagaactggtgttttcagcttcagccagctcttgataatgagtgatgcacacacagatcacagaattctcaaagtagaaggatttggggatctttaattctgcccttttctctttactaattgaaaaccttgcccgttgagacaggagaatttatctacctattgcatattagtcataattaaagaactagtgttcagtcttttgataatcatttgattattcttactatatttctatatctaggaaacatagtactttattttaagtgaacagtttttttccaattttaacatgtacccacctcctgatattctgaactttgtaaaaaaaatttattttcatctgtcatggatgacaagaattcaaatttttggttctggttgctgtgtgagttggcagctacttaacattggcatcttaatttttcatctgaaaaattgaaataaaaatatccactctgcttaccacacaaaaggtgattatgaagggcaaatgaactaatatatgtaaaaagtactttataaagataaaattgatttcatttatgaatttgcagcctcagtcatcttaccagattaaaaggtcttaatttcacaatcttccttctggatttaatggaaatcaaaagtgtttaaatcatgatataaagcaatagtctgtagtacttggtttaaatgtgtttttttctaccaaaaatattaacctcatttgcagtagtgtcatttgttccactattccaaagatggtataattttataaagtaaatgtctttatagttaaaccagtttaaagagttgcctatgaaaactatcaggagactaaatatgtcaacactgggctatgtcactcactaatatattttactgtctccctcttgtctctcacatccatgtagcttatttacatcagtgtcctttattgtctggtcccacgtaacctgtacagttcagtcaaccagttaaccttgatgcaagtctctgacccacctgaatgcatcttatttgtttgtttttgtttttgtttgagacagagtctcactctgtcgccaggctggagtgcagtggcatgatgtcagctcactgcaacctctgactccctggttcaagcgattttcctgcctcagtctcccgagtagctgggattacaggcacgcgccaccacgcccagctaatttttgtatgtttagtagagacagggtttcaccatgttggccaggatggtctcaatttcctgacctcgtgatccacctgcctcagcctcccaaagtgctgagattacaggcgtgagccaccgcgccgggcctgaatgtgtcttatctccgatgctcacacccctgcctctgtgcctttgctcaggctttctctgtgatactctatgttctcctacttgggactgtcatggcatgacataccttctatgtctgattttgggtttatcttctctgtcacatgttgtgaaactaatgactacctagactaaatcactaatgataggcagccacaatgatcttgtacttgatgtttgatttccatacataaaggattgtctcatatgttttctagttgtattcctatcttaccttcctcagctagtgtgtgagttcatcggggtaggaatcatgtcttctgcttttctcttggtcccaacagtacacagagcaatgtcaggatcacagtaagcctttgtaactggtgatggtgtgatgaatgggtgattgacagcatcagttgtcttcctgatgatattcctttcttgtgttgtgacagtaaagtgggagtcatgctttaatgcatattattttgaccatttttccctgtagggatcactttatccttagccacattcatgtacttgtctcagcccgttcacaaagccttctgttatcctctgcaagtctattgtctgactgggtccagagagtaaaaatttcctgcttttgaaaggaagcaaacattgtctgtttcatgtgataattaggaaacttctaaaaaatataaagtagaaacacagtttgtagcatggctgtctgtagggttaatgtgaaactggtgtttctgtaattgtgagaaatgattatattaatttagaaattctgcttagaagggctatgtttattttaatattaagtattagtcacttcataggttaattctgaatgtcatatacctacatactaagggttcagtaagtttattagatatgatttaatataaattataaactctatcctattgagggagtactttgaaaatacattgcaccaatccctaagcacgatttcctttcttatttattgcatactttatatgtcataatatgcgtacagaaacttccttcagtacatatagttgagaatggaagaatatcaattagtgtaagtagtaaaaatatcaataaaatcaatgattaaatatagtttggcaagaagactgcttaaaattaaagttacgtgatacaaatatttatgtttttaaaatagcacaaattgttaacttttatacattcatatatttatgtaaacttttagttataggttttaagtgtgctgtacttgtgtattaaaaacatataagaaaatggacaataaaaacctaaaatgaaaatggatcctaaatgtgtaataataaagatagcaataaaggctttttttctgggctatgtgttattccatagcaaggataatatcttattaatttttgtaattatcttccaatccctaggactgggactactgtgactaacatttggtagattactcagtaattctttgataagcaatgaaattaagaaaactctttggttttaaagataaaaaaacatgtttcatctggtcgacttataagtgaaatagaaatgatctatccttagcattgtgtaaaactatgttctaatgttgattaattaatacattctggttttaattataatttgatatttccccaaatagggatttcacatctgtctaagatcactgactattaaaattgcaatagtaatttataaaaactgcattgacagaaaattaactatatactgagggcttataatttgctgaatacttaaataccaatatttatacttaattaatacttaattaccaattagtattcagcaagttgtaagctcttagtatatagttaattttctagtctgtgttcttgtttttagatatatcactagacttttcttcctgtatgaagtcatatatatatatagtgtgcgtagctctagctgttttgaatcttgcatctacaattattaacgtataggtttaattcatagtatttttttttttttttttgagatggagtctcgctctgtcacccaggctggagtgcaatggcacgatctcggctcactgcaatctccgcctcgcaagttcaagtgattctcctgcctcagcctcccgagtagctaggattataggcatgcgccacccgcctggctaattttgtatttttagtagagatgtggtttctccatgttcgtcaggctggtctcgaactcctgacctcaggtgatccgcctgccttggcctcccaaagtgctgggattacaggcatgagccactgtgcccagccaattcataatatttttaaaggtgaaatcttttcagctttataatcatcattttcattttgctttagttcgttcttcttagtttatgtgttgtgtgcaaagtggcttcaagctgtgtgttcttctagccttggccaaacaccctgttaatatatgtcatgaaattacagtattggtttaatattaattgttaaaagttaatagaaaagttgcatctttaagatacaattatttttgatggtttacccccaagaaaatagatattcagaaacaatgaacatgctgtatatggttttaaatgcatctaacacattaacattcttataattttaggggtcgaactggaaaaattagagtgcagagtctgaagattggattaatgtctctctccaaaggtctcttggaagaaaaatacagatgtatgtaagacctttcttataccaacagtgtttttagtaataataatgattataacaatttattggaaacttaaattatataatttgttagtagtaatagttctctctctttttttaacccttactgtgcctataccaagttagacagagggtggcagtgcaaagacttggggctttgtgtgaaatggaaagctgattataactaagaggtgaggtgccaggatggagtgagacccaactacaaattatacttcatttaattcttagaataatccctccataatgtaggcatttgagattttcattttctagctgagaaaattaatgctgagataggttaagaatctagtctaagactgcagagctgataagggatggggctagaattagatactaggtttttctgactccaaagcctaaacttttttttatttctttatacttccaatgcttaaaagaaaaagatgaactagaacctttacagtcatagacgataatcctaaataaatatattttacagctgtgacaaaataaaacatgatttttaaatttttattatatttggatttatcaaataaatcaacagtgttcctttacctgtcagttaatgaaaggtatattggctttggaaaagacttgtgttcaggagccaaggagacctgtcttcaaatctctaccacttagtagctgagtgtctttgggcaggttatgtgatttcattgaatattgccaactaagaggtaatagtattccaattttacagttcaagaagctgaaatttagcaaattttcttcaactgaaaaaatgaagctaataattcctgcttggagaataattaggagtaatgtttaaggtacctagaaatagcagttgttgaataaatggtagcagttgctgctgagtccccaaacccttaactactatcacatatcttttgatttatttttgtccataaaatgtgaatttgatcccaccatgcatattcccagatgattctttacagataaatccatacatttgtgggagaggtttagggatattccatgaatggagagatactaaaaaacaataggatgtttgattataggccctgtaaactgagttaagttttgtgtcttatgtcaacatgcatacattttaaaagcttttattttctgggatttctgtgaggttattggattttgaatttcaggtctagaccatgatggcttgttttttctacatagtttgacaagaatgtcagtgaaaagaaatgtggatttatataaaatgaaaagctgattgtaggattaggagataaggtgctatgacggagtgagagcctagttagccatgcagaagaaagctttgcccaagacttttgctttgtggcactttatccagaattgaagtagtttttggaatcataatcatgaaaagatataatttcaacagctgaaaacgttatctttttataatgatcaggaaaggaaaatgttaatgaaaacaccaatgttacaaaattagaaatggattttttatcatctctgatttggggtttcttgtgcttctgaaacaattagggttctctgaaagtaacagttatagtgtggagcttactctgaaatatttgcaaattcaacctcaaagcttacattgtggataattcaacattaactttcagattttggcaggggaagcagaaggctctgccgtgaaatttctgatatttaattgaatccaggaagtatgccattttagaactaattaaatatgaaatctcttgggttttaatctttaatctaaatctttactgggatatctagactttggaatgtcctggggttttattttgctttttactttgaggaccttcaccactctgattccagtttctgtgatatcattattgtttcctttattagaattaatattcaagacagtttgctcttcaaatgcaatggcagggccgccattcaagatcattggtatctgtctgaacattgattttattaatacaatgcccaatgtcagtgtcttcaccccataacaccttcttctcttggtcctttcctaagaatattccttgtttagtttctaacagtgccctggcctttatgcttatagctggctagcttccttgcctcatcaaaaacacatttacagaccaggcacagtggttcatgcctgtagtcctagctacttgggagactaaggtgggaggatcacttgagccccaggaatcggaggctgcaatgagccatggtcggaccaccacacttccagcctggatgacaaagcgagaccttaaaaaaaaaaaaaaagtacacattttcaaaccatccttttaaattatcattagtatctcttctgtgcttatttattagaatttgagtttttagattatgactttcttattacctgcccctttaccctgacactgctttttgtatcttactataatgttgagaatgtgaacttttgtaggaacttttataaggatttatagaaatatgtcaaaatgtctaaggacacttttgtccttatgttttgtgagtagttttactttaatagtggcatagtggtatagccatatgcctcaaaagaggaaagttgggcatagttgatcttgctgaaaatgtgcacttttctgcaaagattattatacatatgcatcaacttttatttacttaacagacctcttcccagggactggtttaaaataaacatcatgctaagactactggataaatatttttgtctatgatagtcttattgtttttaatggaaagaaataagtagagctctaaccaaatctaagtgaaaaaattataataaaaatcaaatttatcttcattgaatttgctttccctatgtatgcttataattaaagccatacttcattataattactgtgtcaatatcactgagcttggttcagtttgaaatttcaccactgacagtgttagatctagcattatattccttataaaaagagagaatggaccaggcacggtggctcacacctgtaatccccagcactttgggaggccgatgtagggcagatcaactgtgatcgggagttcgagactagcctgaccaacatggagaaaccctgtctctactaaaaatacaaaattagctgggtgtggtggtgcatgcctgtaatcccagctactcaggaggctgaggcaggagaattgcttgaacccggtaggtggaggttgcagcgagccaagatcgtgccattgcactccagcctgggcaacaagagcaacactccatctcaaaaaaaaaaagagagagagaaaatgatgcattttgatctgatatcaggtactgtttgaaaatagttttagaatccaataaatatttactccactttcttctattcttggaaaatgtcacatgaagagcatttagattttaagtacttttgaatttttagaacttgaaaatttatttccaaaaagtattaatttctataatgaagtagattgtttgtatttgaaatttcttcctcttccaaaagtaacttatcttaggatattagctttattgttgaaaataatatataattttgatcttcaaagtattgtatatggtgaataaaaggtaaaccaagagtggacaaaatagaagagttttaattttactgaattaagaaaattataaaacaaatcagttttttaatgaatggaaaaacctaaaaactgtatgaaaatatgcacaaatttttaaatttgattaaatgtatttcattacatgaagtaaaacaaaaatagtggttatagctaataaggaatgggagactggcccaaaggagaaaaaacacaccttcttgtactttttagtgtttcttatataaaatagatgtgagtataaaagtctttaaaataagttataatatatatacatttagtagaatattgaatttaggagtgaacacacaaagtttgtaaacaaatctgttaaaatttaaaggtttgttatttaaggtacgtttattcctttgtgtttttttatttttttttgagttggggtcttgctatgttgcccaaactggtctcaaactcctggctcaagtgatcctcctgccttagtctctccagtagatgagattacaggcatgcaccacagcacccaactacatctattcctttgacaagtcatgaaggaagctttgttttggctcattctttctcaataagaaggggagttcttatgaagatcataaaattaattcatatgcatttattgtatcattttaaaaaggaaatttgcatttattgatttatattatatatgcatgatttatgtttatatgtatacataacccattcttgcaggaacgggttaactacatgcttcttaaaataatctaatatcatatgtaatgcagaatattaagatcagaatattaaggtcattggaattcaggagacaacgaatcagattcatgtccttctgaaatttttttaatctgcatggttcagtccacattaccaaagatatattttaagtaaaagaacatggtagacagatgaaagttaacctcttgcctctctttgcagatctctttaaggaagttgcagggccaacagaaatgtgtgaccagaggcagctgggcctgttacttcatgatgccatccagatcccccggcagctaggtgaagtagcagcttttggaggcagtaatattgagcctagtgttcgcagctgcttccaacaggtaagcatgaaggatcactggtgtgtaggatgtgttggcgaagggttttgaggatgttctgagacatggaatagggaactcgggctggagccaaatactggaagactttgggtaccatccaacaagtggtgtattttatttcctaaggctcatttgcttcaaaaaatagcaacccttgcaaagagacttgctgtttttctttgataaaatctacaatctttaacctgtgccattagattgctgtttgtcctgcccttttcctggcctcatctcctaccattcctctccttgctctccgctttccagctgcactgttttatttccttgattcctgcctcagcagtgcctttggacctgtgtctgctgtttagacgttcttccttccccattgcccactacctcccttctcatacctaatctttatttgatctttagattttagctttagctattacatcctctgaaaatctttctctgacctcttcagataatgctgtattttcctattatattcacctaatatcgtccacctcttccttctcatactcagtgcaattataattacacactgaattatataattcatggcttagtgtttgtttcttctctaggaacctaagctccatgaagacaaggactacggctatcattttactgttgtatcctgtcttagttcattcaggctgctgtaacaaaataccataaactggatggcttttaaacaacagaaatttattttctacagttctggaggctgtccatgatcaaggtgctagcagattcagtatctgctgagggcccaccttctggttcattgcaacctttcttgctgtttcctcatatgacagaagaagtgaatgatctctcttgggcctctttttttgtttgtttgttttgtactttaagttctggggtacatgtgcagaacgtgcaggtttgttacataggtatacatgtgccatggtggtttgctgcacccatcaacccatcatctacattaggtgtttcccctaatgctatccctcccctagtcccccacccactgacaggccccagtgtgtgatgttcccctccctgtgtccatgtgttctcattgttcaactctcacttatgagtgagaacatgtggtgtttggttttctattcttgtgttagtttgctgagaatgatggtttccagcttcatccatttccctgcaagggacatggactcatccttttttatggctacatagtattccatggtgtatttgtgccacattttgtttatccagtgtatcattgatgggcatttgggttggttccaactctttgctattgtgaatagtgcctcagtaaacatacgtgcgcatgtgtctttatagtagaatgatttataatcctttgggtatatacctagtaatgggatttctgggtcaaatggtatttctggttctatatccttgaggaattgccacgctgtcttccacaatggctgaactaatttacactcccaccaacagtgtaaaagcattcctatttctccacatcctctccagcatctggtgtttcctgactttttaatgatcaccattctaactggtgtgagatggtatctcattgtggttttgatttgcatttctctaatgaccagtgatgatgagctttttttctatgtttgttggctgcataaatgtcttcttttgtgaagtgtctgttcatatcctttgcccactttttgatggggttgtttatttttttcttgtaaatttgtttaagttctctgtagattctggatattagccctttgtcagatggatagattgcaaaaattttctcccattttgtaggttgcctgttcactctgatgataggtgttttttgttgttgttttgtttttgtttgttttttgtttgtttgtttgctgtgcagaagctctttagtttaattagatcccatttgtcaattttgccttttgttgccattgcttttggtgttttagtcatgaagtctttgcccatgactatgtcctgaatggtattgcctaggttttcatctaggatttttatggttttaggtcttacatttaagtctttaatccatcttgagttaatttttgtgtgaggtgtaaggaaggggttaagtttcagttttctgcatatggctagccagttttcccaacaccatttattaaatagggaattctttacccattgcgtgtttttgtcaggtttgtcaaagatcagatggttgtagatgtgtggcattatttctgagatcttgggcctcttttataagggcactaacctcattcaagagggctccaccctcatgacctaatcatttcctaaaggctctacctcctcgtaccatctcctaagtggttaggtttttaacatatgagttttgggggacaaaaatattcagattattacatttcctgtgccttgaacatcataactactttaataaatatctgctaaagaactgaattaaaatgtcctgagttctttttaagacaagatttttaaaatatatatacattaaagatgttattaaagtatcagttttttttctttgagactatgcatacaaaagaaagatgtacgaagttttatactgatctaagttactaatttgaaactgagaaagcactttcatttctttttaatgtttactgcatataaagacattttagaaatgttactactgatgttatacatatgcataaagtacaagtctacagatattttggcaaagcatatccagtgatttatcattgctagggaaaaaaaaggctcacaccgtgtctttgaggagaattgatgtcatgggttattacattttataatggccctttttcttattttagaaatacaaaaaatatcaaatgcaaattctaaatatgatttatagtcatacatgtaggttcacagaatgacctcaacagcaacaggaggataaaattggtagatatttagctttgcacataggaaaattacttagtattgggaattgaagagggattggggagttttatgtaatttatcctgataaattctgcaaagtacatccatagcaatatgctttctgtgtgatgatataatgggactagagcaggacacacaaaaatgacagcttttatttagcatttataatggccttcaagtttgtaaaattatcggtgagtctttcacaagtttttactgtcttagatgaaatttttttttttttttttgagatatattcttgctctgttgcccaggctggagtgcagtggcgtgatctcggctcactgcaacctccgcctcccaggttcaagcgattctcctgcctcagcctcccgagtagctgggactacaggtgcacgccacaaggcccagctaattttgtgtgtgtgtgttttagtagagacggggtttcaccgtgttgcctaggctggtctcaaactcctgagctcaggcaatccgcttgcctcggcctcccaaagtgctaggattacaggcttgagccaccacacccggccaaatgagttttacagaattatttatgtaaaaagatgactttaaattgagtggtttgggtttttgcttttgtttctttcaaaatctgagtatattgaagtcttggtatttttttgcttcttcctatgtgacaatttctgctttttctactcataagttctagaattttcttgacttgaagaaccttaaagcattgtgacttaactgacatggaaagagttatatagtttcctcttctgcacaaattttcagaagattatgaagcaacaacactagctacagtttaaatgaaggcatttcttcacttttaatatatttcttttttcaccagaataacaataaaccagaaataagtgtgaaagagtttatagattggatgcatttggaaccacagtccatggtttggctcccagttttacatcgagtggcagcagcggagactgcaaaacatcaggccaaatgcaacatctgtaaagaatgtccaattgtcgggttcaggtaaggcgtgccagtgctggaggaggctattttctgtttcctttgtgtaatctcagtggtacgtccatcctccattcccattcattcccatttggaggtttgctttctaaataaatggtatgttcagtatgtctcatctatctaaaagtagcatttctttttataactactacatgaagcatattttattattgttgctattattattgtcatttacactacttggatcagaaccagagatttttatgaatgtctgtttacttaggtcacagaaatgattcatccatgaaaactgtatggctgattataaatatataaccctgatggaatttggtaaatattctgaggtcttggggtcaaacttagtaagcaggaagcaatgtttaattaccagctgagaagtaatcaaattactttgtgttatttctgccaagtttgatgtgaagtacattaacccgacttcttcccatgaggagcactgctaaatgccatactttaatgtaatcagtgtgtcagactcttcagtttgtgaccccaaagccgacagtgcagagtctgtggtttgtcctaaggtggacatttttggacatcctgatccactcctcttaacataggtatgcatttgacctcttgaatatattatatttctctactggggggaatctggaaaatagccccagtttaatttggaaatctattatgaaacaacataagcctactcagtagggaaattcaagattttgtgtgtgtctttttttatttattttttgagaccaagtcccactctgtcacccaagctggtgtgcagtggcacgatcttggttcacttcaacctctgcctcccaagttcacgcgattcccctgcctcggcctcccgagtagctgggactacaggtgcatgccaccacacccagctaatttttgtatttttagtagagactgggttccactatgttggccaggctggtctcaaactcccgaccatgtgatctgtcctccttggcctcccaaagtgctgggattacaggcgtgagccgccatacctggccctatgtgtatcttttattcgtaccagaagatcaagtaccaatacggtgattctctgagggagagtcaaatcaggagggctgggattggttgttgttgtatattgtatcagtattagtatcttgaattaaacagaattgttttcatttgactgactttatcagcataatagtttgtacgaagcatatcattgcattctctgtggatggctaacataagaaatgaaaattcaaaagttctcttctctcatgcattatggtgtagttgggaagactaaagtattgtgaggtcagagggccttgctgctatgcattctaagaggaggaaaagacaggtaggtagtgtgaagtagagtgagcattagcctggcagacagctagggtaatagatgacttccagtggaagtcaaagcacaaatgttggaagaagaagaatggtaaagtcacagtttaaatgcagcagggttcttggaatggctacatttggagtatctggtagacatagatgtatgggagagggaatagctggaatgtggcaaggtcagtctactactgggaagataattcaaatgagagatgtagtcatcaaagctaataatcactgctatttattgtttactttatgccagacaatgtgctaagaggtgttatatttgttattttagtcacttttcttaataactctgtaagattgggagtattacctctactttacacataaaggaactaagactccaagattagtcaacttgcccaaggccaggcagccgattgtgcagagacaaagttaggattcaaatccagaaccctttggttttccagtttgtgttcttaatcaagatggttttaaaaagcagattagatttttaggagagagagatttaatattaagaagtaattaaatggtattgaaaagagcaattgatttaaagcactaattattagaccaaaaatattactctggatataaacggtaatgtgaagccatgggaaagatccagattaattgacttgggaagagactgccatatatagatatatataaaatctgccatatatggccattggtataacctagagatgccatgagggaccatgtttctcagcatctgatggatgtagagagtgaaggagaggataaaatactctaaaaacattaaatatttgaatgacctttaaagtttcatttcttaaattaaaaatgacctgaagcaactatgtagaatattaagatttaactgagttgtgggacatggatgtttattatattctccctacttttgaattaacttgaaatatttaataagaaaaatatgaaagagcaattataaagggtgaacaacctgaagtgttaaatttcaagggtttaagtttctgctagtactatcaaattgacctgtaaatgtctctatgatagagatgtgaagttgaccagcaggtcagagattaaggttatgggaggatattcaggagatagtgtattgagaagtagctctggagtcaggctacttggatttcaatcctggatctattgtttggtgctgagactttgaataagatacttggcctgcttgaacctgagtttcttcaacttcaaattctatgagtgtttcctcataggaatagttaatacatgaaagtatctagggcagttcctatcacagagtaggcattcagtaaatgttggctctttttgttactaccaataacatcattagtgtgatagtagctaaacctatgagtgtgttgttgaacatttccattaagtggaaatgccagaaaaacctggacaatgatgttgctcagtaaaaggcaagattagagagaggtataataagggacagaacaggattcttcagagaaataaagacgcatagtgtgctttagcaagatggtagaggtgttaagtgcatcagaaagattctttgaatcagaagtcattgggaatcttagagaggattctatccgtgtcgttataaagatggctcaggaaaatacataggcgaatatgtgcaaacaacttgtttaagaaatctagctataacttaaaatatgtcaggatattgaaaattggaagatggtaagtgatatattgtcttacttttacttgcatttatatttttcctgttttctacattgagaatatagtacatctaaaatttgtatttcgaatgagagagaaatatgtccagacttgatacctggtttaggcacaagagtgagcaagcaaaggtttcttcaagctaatggtgacttaattattgcacaaagattacacatgaagggaatgaatataagaacaattccaatagtaaaatggggtccagttggaataggtctgattagtttagttgtaaagagatgcatctttctctgtggcttcagagaatgaatggaaagacaagtacagaaataaagatagaggaatatgtctattatagaataatcttaacttcattcagactgtctttctatcaagcttctacccaagatatatatatatatatttcattttccccgaacttttataaatactgctagagtttttcactaattacttccaaataaaatgttaatgaaatcttagatttacataatgttttgtaagctgggaattgtttcagttagaatcatacacaattccttaatagtagttgcataaataaattagaactttagttttctttcttgtaaacagagtgaaggtaggtaatccaagactgttctctgtgaccacctgggcccttagctctgttttcatgcactgtcatccctaacatgtggcttccatcttcaaagtcacttcatgctaacaaagtgactcttctggatgtcagatccattttccagtggggaggaagaggcagcatgcctcttcccagctaactcagtcccttgaaattccaattagaacccccacccaataactttggtttttattgcactggtcaccaacatcagcaagagaggctaagaaacagtaattttctcaaggctcattgctaaaatgtgctaacagtacaagggtatgttaccaatgaaaaagagagaatggctatctgccaagggagtattcagcagaaaacaaaatttcatttagaaagaagatgtcagtcatacctgtcaagccatgctgataagccaagagatgtcgttagtgtatgtgattgtttcaaaccaatagcctccttggcaaaagtaagctggctgtagtatatgcagaatgatttccttaagattgatttgcaagtgatttttcaggtcattttagaagctactcagtacttagtagtttacagccacacaacttttaaattttgcttccattttcattctgttggttctatcatttaattttttttctgtagatgtgggtataatttatgttcttagttctaccagcaattctgacagaacagatttcggagaagatgttttccactcagacccatagaaacttatcgtctaaggttttgcttttgtaaataagattctgcaagtacaagtcaatgtgcagtgtcattcttacgccagagattttaaaacaccatttccattcaaggatgcattgtgatcaaggctttatttagtttttcctttgttacacagtatttcttgatttcttttttttctagtgactaatttaaaccaaatataaaagtgctcattgttgaaaactgtatctttgtgagggaattttaaaattcatttcttattggtggtataattgatattttaaaatttgatgtttcaacttaatagatataattcttttcttgcctatcattttccattcgtattcaaacattaaaagaaatcttctgacatgcatatttgtctccctctcatgtataaacagatagaagcatgtttcagagacttgaactccaaaattttatattttattttttggtaattcggatgaatgaaatttcttaccacaaatttagactaaatgatagtaatgcaagccaataaattttcttttgttttctctaggtatagaagccttaagcattttaactatgatgtctgccagagttgtttcttttcgggtcgaacagcaaaaggtcacaaattacattacccaatggtggaatattgtatacctgtgagtactaacccactgttttgtttttaatacattgccattgaattaactagtatctaaaattttattatttatttagacttaatcttttttgaaaaaatatcactttgaagattttttttttcttttaagtaaactcatttatgttgaattaattagtgcagaaaaaaatattaacttttttaaatatctgtgttttgattttaaacttttttggtagcaaattcttttaagagctgatactgacctacactgaaaatgatactatgtaacgaaaaatcatgtttcttttagacatatttatgctttcatagttaaataccatattcatattagcaaaatacagaaaatggagatattaaaaatatagttcctaactctagctcctgaataaactaccttctaatttttccatatctctggttttaagattctatttatatttatatttatgtatctttttccctgatatttttcactcgacattccatttcgtcacacagtgtaattttttttagtcacaaaatttttaattgagtgaattactacagtttacctaaccattccctgaaatttggacatatagtttattttcaattttctgatgttataaataacactcttacaagtatctttgtgagggtagctcattccagatattatgtaaactacattgcaatagaataaagcactataagtaggttatttcagtcaatgaatatgggtattttttatggtcaaaatacttgatgtcaacgtttttttcaaaataggtttatcccaatttacattattatcacactttgttaaagtttcaattttactaagccccaccagtattggacataagttcttgtttttcctttgatttacagctattttttcctgaagttatcctcatgttctattaatagctattcttttacttccttccaaataatgcccaaatgtattcatcaagctgtctattttctttggtttagggaattgagttacttttttggatcataaattgacagaaaggctgtaatacttataaaatatacacatataaatctcacactcataggtatcttatctcaaataaataagtgccctgtgtatggagaggaaatctgtagaaaatattgctgaattataatggaggaagtgcccacatcacattatagctttaaccaggaaaaagaaatctccccaagaaaatttgtgagacatcatttattactattatcaacttattcactcaacaaattaatattgaacattttgcaggtgtcaggccctcttgtcaaagataagcaaaaccagacactagttaaagtggtaaggacagattttaatcaataatatactgattatgcacatgtatttctgtttgtacagaggtgactgggtgttttcagaagggaatagactggggaaacaaaagagggacttgagcagaggcaaggaagtgaaaaatgacaaagcattggtcagcatcagttccatcagaccagctgtgtctgtgagctggcaattgtcagagttaggattctaccattccagagagagactgggagacaggggtcctatccttcctgatgattacatttcaaagaaatggttttcagatccttgagaaagacactcctgagttgttggagatacatccacatctcaaagggacagaggaaggattccccattgtaaaccctttccagtaaatgccctaagaaagagtgagcagggacctgtcttcaggtgttggctagagtgaacagtaaattcttttggcagtctggagtttgtttttcaggcagacgctttaaggggtcagacgccttaataatcccttttttaagggtcatcctagggatgtggtcttgaactgttataaattatgttcatgtttgtttaagtcttttaatggagaagtgggtggacagggatggacaaaatgatttgtgctgaaaatttgcagcttttataggccaaggcttcagtagacaacagagcttacaggaggccaactcaaatttggtcaaggagagaatccttgtcagtaatttcagctctgatagtgtatcagagtatacccagaaagataagattgtggacttcctgctactctccctttaggaggaagaatgtgtgagaatgaacaaggaaacgaataaatggggttgttatacattgcagtaagtgcctttaaggaaatgaatggataatgagatagaatgattagaagagacattttagataaagaaatcagtaaggtttgtctgagttgacatttgagttgagaccaaagtttgagaaagattcagccctgtaaagaactagtagaagcatgtttcagaaagaagaaacagaacatatagtggtctgagttgggaaaaaggttagcgtgattgggctgcagaaagtgaagcctgttccccaaggggcgcatggaaaggagcactggttacacaactggaagtgcccagtgcaaaatgaaactggggggccccttgtttaacaattattaagacttccgagttggcaacatcagaggagtaaatgaagttcaaagcccttctgattgtagggccctgtacaactgcataagtgcaatagttcaaagcccttctgattgtagggccctgtacaactgcataagtgcaatatctttgaagctcaccctgaggctgggaaagaggtgggtgtaaccagggaacagaaagaaaccaggacaaatttgacaaaagagagacaatagtaggagatggaattaaaaagaaaggcaactatcagattgtatagaaccctggggatcattgtaaggaatttggattgggggaaaatatcatagtaatatttacatgaatagctattatagaagtttagaaaactgattataaaatgctagtatcaaaatatcataaagtaaatatatgttgttatagtaaagatatataaaattactatttttcttggtcttgaacatataataattcttaatggctttacaaaatacctaaacaatttgaaacccacatatcttcaacagttgtcatgcagtaggtgcatacttaagaatcactgatacacatatgaattccactctccaactaccaattttaaatgaaatctgtaagttacccaaaactgttcttgttgcatagtctttcaaaagtcactgtttatcatttccaagattgcagcttatcctgcattatacaaggatagcttcatttttcaagacatcctttgcccatttctgaggctttgtagtgatcttatcaacagcctacttataaatcatctgtatgacaggtcactttctgcatttgaccctacaactttttgtaaaataactagaaatatatgtaaattgaatctttaaaaagatacttgcatttaatagcaatgaatgatctgattgctattattgtagcattaatgtctttccattcattctctgaagccacagagaaagatgcatctctttacaactaaactaatcagacctattccaactggaccccattttactattggaattgttcttatattcattcccttcatgtgtaatctttgtgcaataattaagtcaccattagcttgaagaaacctttgcttgctcactcttgtgcctaaaccaggtatcaagtctggacatatttctctctcattcgaaatacaaattttagatgtactatattctcaatgtagaaaacaggaaaaatataaatgcaagtattcagaaatcattgctttctgaaatttctttctgttcacccacattctttacatttgctctactcttttaagttttatttatggttcatccatcttttactcaacatttcctaaagtcgtttcatgtctgccttagaaaatgaactcaagtgtgaatttgtttggtacagtgataataagcaacacttgagtgttaaatggatcagaccttcccatatggaccttgatgtttgcattcctcagactgcatctccctttttagttaagaagatgctccagtcaccttactgacttcatctctttccttttcaaagtcctttacagctgactctgaatgtttctatttttaagagctttctgcaatttagaaaccttattttaaatccacaaagcaccctaaatattttgccaatatatctgcttatgatttatggtaatgttttcctttagctgtaagaagactaatggtatatgaatgaactatcatgactcatgaaagtattttatgatattgataatttatatatgtatatataaattatctgaagaaatgtagcagaatttttatttctctaggaaatgattttttgtcttatttccccctactattctataatccaaatttgtacatttaagaattctttcattaggcttaataagagttgatcttcaagagacagcatgacacagatgatatttaatgcctgtcatcattctgtctccatatgtccaaatcccaccttctcacaaaaacagctcaactcccactttgtgtgtgaaatctctcccagctcctccagttttaccctcatcaaagcacttagttcaggggcctctgccaatagcctctactttaccaattaggatttgattctatgttcccttgtatcattttctaactgtggtgtttttgtcttctcaattatctttttacctccttgaggactgggatgacttttatacttttctccctgtgttagttaaatttgcctcataaaagccagatgagctcgtatctgactttataaatactagttatagaatattaaagctggaattaaagctctaagagatcatctaacttatctttattttgaagaaaaaactaagtcttagagaaggtaagtgatttgtgcaaagttaatggtatggatttagtgacttaactccattagggaaatacacacacacacacgcagttagcacattggaaaataggggtttgtgtatatccttgctggaatattatgtttgttgaatacccttttacataccaggcattttgctaggagttggaaatagagagaaaatttcatgaaggagaaaaaatacctctatgtggagaaattcaacaagactgtaatattttttagaatgattaagcttatgaatcaagagagtagtcaatttttttttgtattatccatgcattaaacctttgaattcagggattatcattttttaaataaatagttatatcttatattaaagatgttcagatttaaatttcttttttatttatgatgatttaatttcatcgtgaaaattaccctactcagatcttctttaaaatcatctttgttgtaagtaaccaaaatttaattcaaattagaaacattttcatatgttgttagagcatataaaagatagtgtgtggttttgttttttgagatgagatctagtctgttagtgaatttcaagtgtattatctgtagccacaagctgtacattaggtctccagaatttattcatcatataactgaaagtttataccctttgaccagtctcttctcttttcctccaccccccagcccctggtaactaccattctactctgtgctactatgagcttgacttttttttttaaaggtcccacatataagtgagatcatgcagtatttgtctttctgtatctgggttatttcacttagtataatgtcctccaggctcatctaagttattgcaaatgacagaattcccttctttttttatgactggatatatttcactgtgttttctttatccatttttctgttgtaggatacttagtttgattccatatcttggctattgtgaataatgctacagtgcacataggagtataaataccttttggagataatgattttattttctttggatatgtacccagaagtgggattactggatgatatgatagttctatttttaattttttaaagaacctttagattgtttttcataatgactgaaccaaagatagttctttaagttggagagttcttctttaaatttcacatgatttataaaagttcatacaattgctgacagtgagagagaagtggatagggttaaatactaaggataatggaaaatgtttagaatagctactagggtcaatcttgagtcacacagagatgagtaaactgattgctaccttgccactagagtgcagctgaggttaattgacaaggatttgtagtttgtgactccatcattgctcagcagctttggaattaaaagatgaaaagtatatttgaaggccaagggagtgaaaaattccaaggtgttaatgatactgtggttgatttgaggtatcctcatgctgaagaaatcccaaggtgggataaagggctagacgtcaagatgatggggaaagaagaggtttatttataatataagaagtgagaagaagagtcagaagattccagtcagtgaaagattttttcaagttagagattttggactaaaagtggttttaagttatgatgaggcctggggtatggccataccccaatgtgtgactgaagtgggacatagaaggttctagaaatgagatggcttttagaaggtcatcactgcatttctagaagtgaagtgacagatgatagccctgtctggcgttgtgccatcaaaggagaggggaagggcacattggctttagtagatgaagctaaggggaaaagggtgtgtaggagaggaaaaaaatatcttcttcccatcttagtttcatagttgaggctcctgtaacaaaagacagattaacaagagaaaagcatacgaattgatttaatataaattttacattatatggaagccttcatcaggaagagaagacccaaagaaacggaagcctgtgtatttttatgcttaggtttgatgaagagtggacagttgcgtagaagtatgattgaataagaagatacgacctaatgctaatgaactaggcgaacttagcaaggcctgtttgttcagattcttttctgtgtccttctgttttcagtgataaggatgtttcttccctccaggaataaggagggcacctctcaaataagggtcttatgaccctttagggaagaaggatgggagaaggtcagagagatcttgctacgtctgctgttttctcaactgccaatgtgccatatttggaggtagtgtgtcctgaacccttgccaagtgtaaacatccttttctcttggttgttatgaaaaagagattatacagccacaaatgaaaaagatgttataggaaatggcattatcatgggagcttcgggattgattcaaggagataggttgaaatactaattatgaacaaaatgtaaggtaatgtgtaaaagaacacagaatccactgtaatggagaaagaaaggtagatagataggctgtatgcatatagtgaggtacagtaaccccatccatggagagaaaatgtgaaatagagcaaggtaatggaggaaatagtaaaaggaaagaaggaggaaataagcaaggaaaggttagccaggatagaaaggtagtttgagagacatgttagctgagggagaagagacaggatatttgcaaaattttgtagcttgaaaggtcaacagcatcagctacttccagcatttcaattgcaagggtagattcattgtcaatgtcatagtttagttgctgagctttacataggactagtttgtactggtaactttgatgagtttagtgagaagaggcaacaacaggaaaaaaatacctcaatgagaaacagcttattaaattaataccactcaaaacagatttatattgcaggttttaagcaaatacagttgttttaaaagcaagaggttcaactgtattcttgttgatattgattaatatgtagggaaataaaccaaaattacatgttttccatgagaagaatcatattttcagtgagaagaattacaattttctagtaaaaaatatcgaatttctgttttaaaagataaattgtgccttttttttatgaactatatgccattggcaaaaataaaacacacacacacacaaaacacccgaaaagaacaaagaaaaaaatctagaagcagttgttttgatcaatcctttccacccctgccagcatcaatgtacttcgtaagactataaaaatcaaatattttaaaaatgctgattcattctttggaaagctctaccttgagttagggtagtttgttttttggcagtcttgtctcttcagatgtgatgtggggtgtttgccaatatactgaaaacgcagcatcacggctgtttctctgacctcagcatcctgaagtggtgtttcagctcctgctctccttacatcgttttaccagtaggtccagtgcatttagatttgtcattagcttttaaggtgaggtttgggcaaaatccattttattttggatgacttatcatcccactgattcttgactccttggtaattctgctaatgctaatttttttagcttcatatattttcattagggcttgaaagtctctgagcttttcttactgattgcatcctatccatggcattcaaatgtgtctgaatttcaacttgttgaaatcattgaaacttaaataaaaactgagaggttgttttatagttaaaaaaaaaaaacctgttaagaatatctttaaaataagtcttgtgataatgaaatgtaccgcttagcagtatgcatgtaccagttgggactactggtttctatatttaagaagtaactcttgctaatgagggtgctgttcaacaatgattttagcacttgtgcatgatccaaatgataatgtttaattattctgtttgcgtgccaagtgactttttttatataaccttgatttgcctctttgtaagcctttgttttcctctgtatgtaacttattcatatttgtaattaacaatttaaatccactgtttggagcattaaggaattagttaatactgatatctcaagttaagaagtgactccccaaaaaaaagttgtggggagaattaaaacaaatattttctgttttgttttgtttctttatttgtggttctttatcttgttttgtttaaattgtttggtaattagaagttatttacgggatttaggttatttggtagcattgtaaatagcttcctttcatgtgttgctttgccggtctttggggataataataagagtcctttgagctgacctagtaaagccgtttattcaaggatcacttgattatgaatactgggggaagggggttagcttttctacattctagattcttctataccttatccttgctgcttcttgtgatacatattagtgaaaagggaactttcagccatgtattaatgcttttgaagttcagtagtgcatagatttcagcataaagtaagattatacagtttgcaatatgaacagggacatatagaaggatacacatgcattcatatagagatatacaaactcaagcaaaagatagagtaactctaaattatgttccatgtgatgtatctatatttgttctctgtcaaggataaaatggaagaaaattgaaaatttcctaactgtattttggttggtaaaatacaatctcaaaagtaaaaaattatttgatttcgccttaaaagtgattttgtttagggtttttctttagggttttgctacagatagatgtatcacagggtacattttataattcagtgatactttccatattttatttattcatttatattagttggtggggaacaagtaaaaaattgattaattcttattatacaggtaagttttcattgttttacggctacttaatagcagtacagtggagtaaagcacattttcagaattcacatgcccacttatctgtgtaggttcagttctaaaatgtttttcacagtgagtcactgtcattagctttccaaaaatgacaatttcaaggacagccctaatttgtacatgtgaatttttatgtgcttgttgaaaatcagtccagaggcatctggggaagatggtggtagcatggcatcagagtttttttgttgttgttgttttatttttttatttttatttttatttatttatttatttatttttttgaaatggagtttcgctcttgttgtccaagctggaagcaatggcgcaatcttggctcactgcaacctctgcctcccgggttcaagtgattctcctgccttagcctcctgagtagctgggattccaggcatgtgccaccacgcccagctaatttttgcatttttagtagagacggggtttcaccttgttagccaggatgatctcgatctcctgacctcgtgatccgcccgcctcggcctccccaaagtgctgggattacaggcatgggccaccacacctggcccagagtttttccatgtcttttgcctttgccattttccttccattggtaaagcagttacatttataaagagacatttgtaaagagaataactagacagcaaaactaaaacgtacaatgtttgcaaccaaactagatgacaagagagatccaaaataaatccaggtggcgataagccaccaccagccacaaaacgtacaagacatcactgcctgtatgagaggaaagacaaggaagtgagggtgcctaagaaccagatagcccccaaaataggcaacagatatttaatggaaagctggcttgagagcagagctaaacctggaagggttttgccatgcgcagaggctagggtaaaaaaggtgtgacatttctagaatgctcttgcctgctgtgagctctcagactggacccatcagggcttccttctagaaagaaggtctcatgctgagcaaaacttctgggaatagaatcaatatggagcatctcaaggcaacagaaatgaaaggagaaggcctagtccaaactgttcctacgtgctggtagagggtatgggggaacaggaccaggaagtctcaaactcaagtactgctatgaatggaatgtttatgtcccccaaaaattcatgggttgaaatctaatccctagtgtgatagtgttaggagatggggccttggaagtgattaggtcatgaggatggagctgtcataaatgaaattagtacattcataaaagtgaccccagagagctctctcttcccttccaccatgggaggacgcagtgagaagacggctgtgtatgacccaggaagcagactcactggaccacagatctaccaatcctttgatcttggacttgccagtctccagaactgtgagagataaatctctgctgttttatttaagccactcagtctatagtattctgttatagcagactgaatagattgagacacatgctgtaattgtaaataccacacaaaagcaaaagaagaggaatctctgtgaagttagaaaagctctcctcaacctcattttgttataaaagtttaggaaaattaattatacaaccaaaaaaatgagcaacaaaagtatcaagaccaaatctcatataaaggaattttaagaaaaagagataaggaacaaaattatatcactacaaataaagcatgccagtgtaactactttatgaatgggaggaaaatggaaaagtaaatctatattttaatgttttcactaatcatgtgggtggtagtattggtattagtgttctaagactattgtgtacgtaatatgataaaaagcaaatgaataattatgggattgtctaggtctatcatctcttgtgtccttgagaaccagatttttggttttgaaaaaaggagatagaggtgtattagaaaacaagttaagttaaatcagaaatttgaattggaatcatcaatgtaacttcaagagaaattttaccttcaaatgcatatttcccagctctgtgcaaagaaaaagcctgttaacactgaaaaggcctaaaaggtgtgcttggaacatcttgtaatagtagctaataaggaagctgttgaagactgttagagtcacattaaaagttgccaactgaacttgaccttcaataatgagaattgcaatagattgaaacccatcaaatacattaaaatctcatgatatttaaaatgaacaaaagcattgatcatctttggaaaataataggaaaccatttcatgatactgaaaattagtcaacacagtaaaatatttatcctgacttttctaaatgaactgtaccacagagtacctaaatgttagacatggtgatgtttctttataaaagtatgtattaggcagggctgtctagagggtcagaactaataggatagatgtatatatgaatgggagtttattaaggagtattgactcacatgatcacaaggtgaagtcccacagtaggctgtctgcaagctgaagagcaaggaagccagtttgagtacccaaacctcaaaagtagagaagccgacagtgcagccttcagtctgtggccgaaggcccaagagcccctggcaaaccactggtctaacagtccaaaagttgaagaacttggagtttatgttcgagggcaggaagcttccagcacggaaaaagatgaaggccagaagactcagcaagtctgctcttccatcttctcctgcctgctttgttctagccatactggcaagtgattagatggtgcccactgattagatggtacccaccgggtttgagggtgtatctgcctctcctagtccactgactaaaatattaatctcctttggcaacaccctcacagacacacccaggaacagtactttgcatccttcaatccaatcaagttgacagtattaaccatcacaaagtattccaagtaataaatgaaaaatgaatgatagaatgacaccattttgcaattcccaatgaatggatacggacacttagcatgaacagctgctaagatcacctaagagaggtgacagctattatgtgcctcctataacactgccaaataccactaattgtcttgacaaaagtctgctgcattatctggatcaagttgcagatttgtaggaggttatcaagaggacagacgaaagtactgagctgtaccaaaaatagacattctgtaaaatccagactctggaaaactctgcaggtcaaattgcctgagttttccaacagacaaactgtagggaaatggcaggtgtggaggagggacctgtaaattaaaagtgatttaaaatatgtcagatttttttttaataagcaaaacaaattaaggatagacattggagtgataaaactatttttgaaacataattcaagttatgtactacttcaaaaaatgaagttgatggtaataatggagaggggaagaaagttttgcctggaagcggcttctcgaatgtgcagcagtgttccattttctgactgataatatttcattaagccatacttttttgtgtatatattttgttttactttaaaataaaaagaattctaaaaataaatcagtctagtcaccaaaattttacaaatggctgtctctggatggtcaaatagctggcaatttttattttatttttattccttcatgtatattttatttttctttctagttgtacttataccaaacgtgttatatacaccatttaaatcttttttaagtagctgggactgcaggcacgtgctgtcatgcctagcttttttcctttttttttttttttaaatttttttttatagagatggggttttgccgtgttgcccaggctggtctcgaactcctgagttgaagcaatctgccctccttggcctcccaaagtgctggcattacaggtgtgagccactgcatccagcctatttataaaatgacattttaatataattttttagaaaaccaaccacatggcatctaatcagtacattatttaaaatgaaggacaaatttaggatgcaatattagatattttagtcaatggctatggattctttccctttcaaaacttaaaacagttccatttttctagaagcagtgacatagtcttgtaaaaaggctcaagttttcaagaacatttttttccttactgaacttggttggagtccatcaaaggcttagtgtgagtttacttaggcttcaaaaacctgatgataatctcctcagaggccatgatggttaaatgagattgaaggaaaacaatttataaggtacaaggtcctatgctaacctgttacccttgtgtttgatctaatgggatctgcaaaatctgttctccttttcttacagaaataaacagaaaccgaatcttccaagaaatgcatttaaaatgttgggtaatttgtgtagtaatgattgttcctttcaattttatctttctatcataatatcaaaagttatttccttaaaaaaaagaaaaatgtattatacctagtgtaaaggcagagttgagtttgattatatttattatggtaagtgggtggttctcttttttctttctttctttttctttttttccaaaccaaaccattactttagcattttaaaatagagaaatattaggtactactattatataataaaaatcaaattggaccaagtatatataaatgttttaacatttcggtgcaaaaatgggttaaattcactttattggctctatcccagctgaagaattacattctgataacctgaatataatccctaattccttgggatgaattacttttcactttttcttttaatattgcataaagtttatggcaataatgagttaatgctcttagattacaactctttgtgctagcttttccccaaggaaataaaaataagctatttctgtgtgtgtactaacttttaaaaacatgtaaatatgagtattattagaaactctaatttcaataactactataacttttggggacagcaagtagttgtttgttattttgtgcatgggatagaaaggggttgtttttgttattggtggttttgctttggtctttcatgtcttgaaaatatttagctaaagaatgtatgctgtggaattgaactggcacttttgaataatttgtcatttttttcacaagcaagagttcatgttggaactcaaatatagataaactagaagaactgatgctaagtaaaagaagcaagtcataaaagaccatatattatattaatttgtttatatgaaatgtccagaataagcagattcatagagaaaatagattaatgcttgccatgggttgtgggaggcgaagggtcatgggtacagagtttctctttggggtgatgaaaatgacctgtaattagatagtggtgattttttttaactttatgaattcactgaaaaccactgaagtgtaaactgtaccttaccctttctgaggcacactgggtaaggggcctgatgccttgcccacctggcctttcctctcacccactcactccactcagggctgtgaattgaagacctggatatggcttgaaaaccactggcctaagagatcaaaacttttacattgctaggtatggagtttactcccaagtaaaagctggagtccattgcttattaagtatttctctatattaacagtgtactaagaacagacaaagaaataaattgggtcataaatgcttattcttatacacgggtcctctttatgcatttctattatggaaacttctttttttccttccttaccaagacatttagggtaagcatatctctacactaaattatctgcagttgtgataaccattgcaaaagatgtgaaaatcgtttatagtagatgatatatccttttggctttattctgagacccagatattgcttctctaaaagtttccttatttgctcccaactacaatctgttgtttttttttttttccttttctgcctggtaagagctgaatactctcaaaccgtcagatcttataacaacccttttttctccacagggtttccttgaattctttttcttttcatgaatacctttttcttctgcacttttgctttgcatttgggaagccctatatccatataactgcagatcattatgtagttaatattcagttattcaggaaaagatgggtcattgtgaatctgatggcaaagcctggtgatagcatggggctggcaccttgttgcaggttgtttgttttgtcagtgtaaaaactgatgaattttaaatgataagtagctgcggcttaatcatgtctcatctctgctttgcaagccaagagaatcaaaagttcccttaattattgactagaagcagacatgttttgatagaaggggaatggatagaaagtggcaaaactatataagggttaactcagaacttagttgttttcaaaaatagtttggtttttgtttttgtttttttcaatttttggttgggtgcagtggctcacacctgtaatcccagcactttgggaatctgaggcaggtgaatcacttgaggtcaggagtttgagaccagcctggccaacatggtgaaaccccgtctactaaaaatacaaaaattagctgggtgtggtggtgcgcacctgtagtcccagctactcaggaggctgaggcacgagaatcggctgaacttgggaggcagaggttgcagtgagctgagatcgtgccattgcatgccagcttgggcaacagagcgagactctgtctcaaaaaaataaaaaaagtttctgtctgcaaaacaagtttctgtgagtcctgggcatgcatgttgtgaaggaaaagctgaagggcagggacagggagcaggcagcaggtaagcaaatatacttatcattcagtgtctgtgattacaagaaagtttctctctccttctccccttctcctcctccgccgcctcctcctcctcctcctcctcctcctcctcctcctctctctctctctctctctctttctgtctctaagaggagggagtgaggtataatgagtggtaggttgagcagccaagttggagccagaggatcatgggcttcattaagttctgtgcaggtaatgtaaatattttaaatgcatcttcggaaggatcacagttgatatctgtattgtaaatagaaactagaattgtgatatacagtagaaaactggggcttggagaacaatagttcatgggataggatgatggggtgggtggggttgggatagtgttagtccatatcaccctaaatgattatcaaactaatcatttagaaatacctaagggaacagtgacattttataccactattaaaaatgtagttcaggtaaaataattatatgtctgcatagttgggaaaggacaaagaaattgacagtattccttcccaaacagagcaccaatgtggccctgctctttctctcttatttattgtcttacctttttccccactagaatatatgctggcttgtgtgtagccagcatcggctctatgactaatttccattaacacagcttggttaaaaccattgtggttaaaaccacaatactctgtcatcactatattaatagcaaattgaaaatttttttagtgataagaaccagccaatagtttggaaaaattagtttggaaaaatttcaaaactaattatactttttggcccaagttttaaaatattggggaaatgaactaggtatggtttattttcaacagagaatgaaaaagtataaacatatcactggatatatttagtgatgagttcttattgccaagtgttttcatgagactgctttatttcaaaaatgcataaaactaccaaaactgttgacatttaattgcatcaatttacatcggctctgattttgttatagatagttattgccttccattttactgagagaagtgtaattgttttcaaccttatagacaacatctggggaagatgtacgagacttcacaaaggtacttaagaacaagttcaggtcgaagaagtactttgccaaacaccctcgacttggttacctgcctgtccagacagttcttgaaggtgacaacttagagacgtaagtttgattttaatattaaatctagtgtgaacatttatatctgatgttgtcttttttatgttagtaacacaagagaaattgtttaataccaactgcattttagaggaggtaaattaaacttggaatcagtcttcacaacatgaatttttacaattcacttttgacaatgtcacagccaaaatttcaattttaaccttgcacatgtccttaaattttaaaaatatgtattaatatgtcaaccttaatacacactggtcatctcttttgttggtcatctcttttctttttaaaaacacttaaagtgtggcattatatagtctttcattatttattttcctttttttccccttatggggggtgttttactatttctcagagtatgttttatactctttttgcatctctttaatataaatttattaataatacttaatctgttgattcagatatttatgctaaaattctaaagtatcacattatgattctaatctattttttattgaaaatgaagacagcaaactgagatagctttatatattacataaaatagaaaaaatttattcaaagtgtataatttgagttggttagcatacatgaaagtttcaagatggtgaaattaccatgtgattataaagcaaagggaataagaatttatggcctgaagtgaaaagaaaaaaaatgtttttcaatgacccagaaaaaatgcaaagaagtaattttaagatactaaacaattatgtgttaagatccaaatagatagattttaaatctttgaattgctttttcatatgtcaggataaatattcctgctaaggccattttcttgtggttgaatcttggggaaaatgaacttttattactaatcatcaacagagtgcccagttgtatagcataatgaagttctagtcagagaaagacaccgtctcagatgactagagaagagaaactcaaaagtgtgaagttttctactttataaaaaatagagaaaattgtagtaagaagtataaaaaatgtcaagtgcaatttttgtgaaatgaaactttagccttcagattcatagttcattttattttgtacatgatagaaaatcaggaagtagtaatattttagtgctttgtgatagtcaatgtctcaaacatgtcaaaatagaagaatacagtatttggtctgcagaccaaaatagatttttttaaatccctgtagacctcaaactttgctaaatttatgtaccagtttatctcttttatttgtggaatggctaagaaatagaagaaagaacacagccaaagcataggagatacctttttccctctataggtaatgtcgtgtgtgtgtaaacagaaagaaatacaatgcaaatgcatatttagataggtccatgtataacacatacacatacaaaaggtaagaaaaaatttcaactgtgtgattactgtgcttgatatcaaactgtgtacacttaagatatattctttccacttgatatcaaactgtgtacaattaagatctgtgtctttctaaacattcttttgcatagtacaatttagaaaaagttttaataaagcaatttcaattgaaagagagctgttcgaatacattcaggaacagtagacttttggtcctctttttgatttgtgggtatgcttttgtcctttccttcaaaaggttgtgtgataatagattcttatttgtcttagtatctaatatatgtttaactgtgctgatgccttaggataaagacaaaattgtactttttttgtatcccatccagttaacctttggaatggataattctgaggcacagaattattacttggtgctttaatttacgggataatttgataggtttgaactaagcgatgtgccttttaatcttttgctaaaccattggcattttgcatcacaaatatctacacgctttacaggaatcatgcagatagatgcatattttatactcctttaaaacatttttaatttgcctttcaatgtcaaaataatcattggtgtcagtcatcctattctgagtgactctattaggtaaaaattaacagaaaagcatgccaaataattttgtgctgtgattttggggtgtaattctgaaaatgcctcgcctcaattcattcaattgaaaatgaatttatgagcattttttgtgagaggaaaacaagagaaaaaaaggaagaagtgtaagcttgcatcagatgcaccaagatcctttttggacagatttatgaactactagatatagtgggcaggttttctttttttaatcctagaccaagctctcgggatttgatatagttcacttttcggctgagccctttctagtacagggccgcttaatcttctggtgtaacaatttatgtgagtgggtaataaaaaagtttgattttgtttattctcctatttgtgggaggagaacattggagaaaaaccagcgaagtggcaaatgtgttgaagttatttatgaagctaattagaattttcttttgcttctttctttttcatccttgcaaaatgtagcattttgtcctctgcccagtagttacacatgcatgcatggaggaggggatttatggggaaaatgagttattactaaaagggagtaaacaaatccatgctaaggtttattcgattaattttataactatgcaaaattttccagaaaataaatcaataaatgagtagagtttgattaaagaatactccattgaaaataaatctgaggaacaagctaaaatagtagcaaaagtaattcaagggttgtgagaattattattggctaaagagataggttggtttccctaaagattaaaaaaagtaaaatagacacctctccctggtattggttaaaggggagtaaatgagtttaaagatttttttaagagcctttgctatagcaagaaacaaatacactataagtttaactacagttgcagttaacatccgactagaaggaagtatgacagccaagttgagacctgaaagattaatagggctaagtatgatgtgtttgatgtgggaggttgagagggagagtttctggtccaaggaagcattttcaaaagcttggaggcaagatagtttcagaaactggggtggaaaactatcaacaatggcaagaaatggcagtggagagagaagatggaaccatataatgaagggccttctaagccatgccaaagtgtttggagtttattctgagagcagtggggagcctttgggggtctttgagtaaaagcagcagggatcccacttaccctgctctggagcaaatggattgaagaaggcagaagacaaagaacaaggaagagtctaatgacaatttaaggcactaaaagggtcattaagttcttcaaaatctgggttttatatataaaaccattatatatatatatacacacacacacattgtatatatatacacatatacaataaatatgtatatatagtatatatacacatatacaataaatatgtatatattgtatatatatgtatatatacacaaatataatacatatgtatatatattaatatagcattttatttatatatatatatatatatatatatatatatatatatatatctttttttttttttttttttttttgagacggggtccagttctgtttcccaggctggagtgcagtggcacaatcacagctcactgtctcattgcagcctcgacctcccaggctcaagtgttcctctttggaaattcctaggcagtatgtgaagttggtggtgggggggggtgtccccccagcgttaagaatgacgctgaatgatctggctccagacataagcctgtgagtcaagcagaacaagttttcttgtatcagtttgtaaattaacttctgggtgaaattttcagcctcccaagaagctgggactataggcatcatgacaccacgcacagctaatgtgtttattttttgtggagatggggtctcattatgttaccaaggctggcctcagacacctgggctcaagtgatcctcccgcctcagcctcccaaagtgctgagattataggtataagccaccgagcctggcctgtgttacattttacatgatactaagtgatcctcttgcctcagcttcccaaactgctaggattacaggcacaagctaccgaggctggcctgggttacatttcatataatatctaagtatttgtagcagagtctgctttctggaatattagtgtgtgattgacaaaatcacctgttcagcccccatgctggagagcagggataggctgcgttctgaagcctgggctaacacacacattgttcttatttccaaggctttgtaatgataggttgtaactatgcagtttcttattttctcctttcagaattaaatgaaaaagcttatcatttaatctttttttctacaaatcaaaattttctgaagtcaatgaagcccaaggtttgacttttttatctctatttctttttttagaaatttttcaaatatataacaaaacttgagaaacccttcagttcagttctctacccttgccattctcattttttaggtcatggatcacttttgtgctaactggattaagttagcaagaaccagtcaagcaatttgacagagctttcccaaggttgattaagacaaaaaaaatacacacttttcttctatttgaagttcgtggcatatgttttgctacacttgaattttggaaataatctcttaagcagttactgtttttagaaagtatatagcatatcattcacctgacatttaacatattcagggttaatgaagaacagtgacgtggaaatagtattgactaatactatgttgttttattgttattgtatctattttacacatatgtaaattaagtttactgacagtatagatattctgacaaacagtctggataaatgcctggttctgcagtgagaacacatggacacaggaaggggaacatcacacaccggagactgttgtggggtggggggaggggagagggatagcattaggagatatacctaatgctaaatgatgagttaatgggtgcagcacaccaacatggcacatgtatacatatgtaacaaacctgcatgttgtgcacatgtaccctaaaacttaaagtataataataataaaagaaaaaataaataaataaataaataaataaatgcctggttctgaaaatagatctgaagagtcttagtttttcatcccaataagataatgttcaaaagtctttgctgtgcaggcatcaacctgcacttcactataggagatgaagagaaaagtaggcattatagatacctactttctttgtctaagtaggtatgtataatagaaataggagaatcaaggagttttggaataattttgtttcaaacactgttagcttttgcagacttttatttaattaaatagctaattttctttgtactgtaaatgttctacattcatttactctccttcctcctcaaaaagctagggttggaactagcttttaattaggatcagttgttttcaaaagtatttcatggagacttgggaattcttcctaggcagtatatgacatccccagcattaagagtgacactgaatgatctggctccagacacaagcccctgagtcaagcagaacaagtttttttgcatcgattcatagtttaaacttctaaaaaacttttttttgaagaaaatgtatcatgatctcaggaagttgccttcagtgttatttatgatgtgacatttttggtgggatctaggggtggtatctaggttgcatgtttgttcaatgtgtgtgtgaggttgaggtattttgggtacatctgggtttggatgtttacatttaaaattacatgaagaacagaaaagtctaattttattgcacctctgccatcaacatataatgtagtgtttcatttttaacttcatctttctaaccaagtttcttctctaggaaaaacaaaaatatgattgcatcccccttggtatattatagaatggtatctttacattattctataattttgagttatttttgagcattctggttttttccccagtatgactgtttaaagatgtgtttgctatccttgaacaaatatcctgtaatatctgtgaaaaggcccctgcagactcttgaatacacggcgacttctctagaatacactgtgacttctgttacttttgatttccccatggtggctctcagggcaaccacatatatgagcggaagataattgagaatctccccacacccccactgcttttgtcttaaattgctctaaagtgtttgttctgtgacttttgtctccctctcccctctttgcagtcctatcacactcatcagtatgtggccagagcactatgagtgagtattcatagcccacgtgcaggagaggtgttctgatcagtggtactagcatgggggtcttactaaactcttggtctaaaataatacttctgtgttccgggtaacaatcctagtggtctgtttgcatggcagattcattacttaagtaacctaacatttctaatagtaacacctatcaatatttgggcataaaattattgctttgtttttttcttttaaagcccctcacaatctcctcaactgtttcatgatgacacccattcaagaatagaacaatatgccacacggtaagaaactttgatcagagccctccactgcactgccacccagaatgtatctatgtctaattaatctaatatcattaatataccttgatttaagaaatgcagttttgcaggagttatgattccattatatttggaatttgggctctcatattttcatgacacagtttgcactttaccaaacacctgctatatattctatgaaaagtaaacctaaccaggatgtgattctccagctaatgagaatccaaacactgtacaagcaggatttagatggtgtaaccaagtttcagtaaatgaaagtgggattgcaggtattctcaggagatggtgcacatgtgaattacaatatgtaattaaatttatgctaatgctttaggataggggtttattttagagtctctaaataatatataggctggtcttgatggtgtgcacagactttcagaaaagtggtatatactaggtgtctgtgattctagtaagtagctttgcctagaaaggttaattcaagcatcataaaaatggtaacatttgaactgggtctaggccaactagaatttctaggggaaagtcttggactaatggaataatatactcaaaagcattgagctgggaaagggcatggtttgtttactgaactgcaggtaggggaaagagaaatagatgagaaagtgaaggacacagaagttgaggtctgataatgaaaaacccagccactgaagagttggatcatgtccttagttgaagggaagtcatggagagtttttgttatgagaggaacatcattttatttgtttgagaatgtcacgctcacttagatgtagaccaactagagggttaaggaaagcctaggtctgggagctcaattagaagattaggtcagttaggagactttacaacatggcgtaagataaaggcctacaggcattaaggcagtggtgatagaaaggtagctcaacatgaaacgttttagttttacagtcgtgttaggagatttggatctttctatgttttgtcagaattttgacaatttaaaaatgattaaggatgtacgtccaattgaccatgtcctatatggccatgttgtctaacctccttatttttattttgcagactggcccagatggaaaggactaatgggtcttttctcactgatagcagctccaccacaggaagtgtgtaagtaaatcatgaaattagtgctgcctgggaaggctagttcttgtattatggctgtcagaaacaatcttcactgatgtggctctgaatcttgatcccaatcaaaattattaagtgtggttccaaaaatttctacgtagattttatgctttcaaaccatgatagtataaactcaatatgtttatttactttgtttcatataagttaatgaaaaaaatcttacatttgtcaacttatataccccacgaaaatcagattgttttatttaggataacaggtgtatatattcattccatttgtcttatatttcttattaatttaacaaaggtaatttgacagaatatgtgccctttctgtgaaatcctctttcttccactagctaacattttttccataatatctgcatttagcacctctgacccacacatacttagatatatactcctacccttcattgaaaactgttaactcctctgccaatattttattttattagcaactaagaaaagcctcattgactttagaatactaaaaagatattatatactaaaaagctttctagccaattagtttatttctgatttccccatatgtgtatattccacttggttgtggaactttctcagcaaatattttatcactgattatcccactattgtgtgtactcttacttttggaactttttattcttttttttgtgccctggaattcacatttttaatcctgaataatatctaaaagactaatactgtcaagcttatgtgactaacaaagctctattgtggtttggatctgatgggaatctgtaaagtagacagaaaagttgtcaaacatagtagttgggtgttttcactaaaaaaaaaaaaaaactatggagagtgctaggttaaaatacttaaagtgctcaaatatagaatattctctttccatattttctaaaacttgttttatttattatggttataaataaaagttatcaggaggtttttcaatttcaaatttcaaagattgcatcttaatacttgacagtaatgtagtagagatttatacattatcattcatgtactatgagtgtgaaacaattcccaaatcaaaataaaggtgtattcataatgtttgtttcatatttaacctactggtgtgcatttcatgtaaagtagttaagtatcttgaatctttcctaaatcaacaaatttcctcaaggctgaccatagccaaagcgttaaaggaaataaaagataataattcagaacaaaatcttacttctttaaaatgttttgtcatgccctgtgaacacagtaaaggtaatgctcaaatttagtatattgtatcttaaaataggaataaatactattttcagatttagcactgtttcagaaaagattaacattttttaaaaagaaaagaaaaaagtcagaagattaacagtcagatacattttaatatactgtcattatatatattaactcattcacccatccaacagacagttgttattaatatatacctaccatgtaatggtatgctggagccaattgtgagagctgattgttacattttcaggatgtttgtaagctgttaaacagagcctttttaaaaataatttatatacatgtatatacagttacaattaaataaattagattaaaacaaaaacaaaagtaattctcaaaactcatcacaccctaatgattttacttcatttcactaatatctatgcccttgggattatttattataaacttgtccatcctgcaacccacaggccacatgtggcccaggacagctttgaatgcagcccaacacaaattcataaactttctgaaaacattataagatttgtctgtgatttgttttttgttttttgttttttgttttttttttgcttttttagctcatcagctatcattagtgttagtgtatttaatgtgtggcccaagaaaattcttattctttcaatgtggttcctggaagccaaaagattgaatactcctgattcattatctctgtcaggtggtgtacaaatgtgtatcttttcccagttccacattcagtgaagtcatgaacttgaaattggccatgatcaaaaagtatttaaatcacagaagttgcaaatgccacaaatcaaggtctttttctcttggagaacctgttaaacatttaccaactcacgaccgccatgcacccaatactgcaataggtctatagatgcagatactgtctccatgaatcttataggctagaaaggaaatagataagtagtcctaccagaagaacatgatgaaggcatttgtggtaaacagaatgatggccccccaaagatgtccacatcctaatccctgaagcctatgaatatactactttacttggcaaaagggactttgccacaggtttttaattaaggaccttgaaatagagagattatcctggataatccagatggccccagtgtaatcccaagggtcctcataaagggtaggaaggagagccagagtcagagaaggagacgtagcaatggaggcagaggtcagagagagatctgcagatgctgctgtgttggctttgaaaatgaggaatgcaggtgacctcaaggtgctagatgatgcaaggaaacaaataatctcctatgaaccctaggatgggcattattatgagtcctattttataaacaaggaagctgacatccagaaagataaatgacatgtccctgatcacccatatatctattacaattagatacatgagtacgttcgattgactctggacaatttaaaaggaaattgatgttacgaatactacatatctttgaaggaaaaattgagcagtgacatctcaggacaggataggactcatgacggttctggggaatctcagaagtgggaacgcaaggacaattccttgggccatggctatcaggacgtctcactccatctgccatctgcccttgggtgacactggaaagaaagaatggggaggctgactgtggtttacacaggcattgcagtttgcaaatctgaaacctagaacagaacaatccttaaaagaaagaaaatcattatttttatttatgtcttgtctactttcaaaagttcattgaatgaatcacagtttttttgtcatctgatatgtactaattttgtaatctagatagtgtttactatgtgtgacttaactgtagtataattatattccatctaatgatatttccttggtgcaaacctattatttttgcaacattttctattttagcccaagacatacgattgatgtttaatgtccctgatctggtacctcatgttctatctgcatttaaagagtttgttattggtttttactatatgtaattaagaactagaatgtatctatttttatattcaacatttagacctaataatctgtgaaaaacacttaagactaaaattgtatgttttatataaatgattgttaaattcttatttttgtgaaaactgccttaactctcttccagataccataatgaaagaatgcaatgatagtggggatgataattataataatgtgttaaactctatcagcttccccagagaagtgaatctatatgtatgttgacaacaaaaatacatctcaaatctaattttggctggtttcactatggatagtcagtctccaaatctttaaaacaaaaatttacttggtattaatattaagcactgaagttaatccatgaggtcaggtgctgtagtaaatgttctgagggcataatggtggcttgtgatcttggaggaactctacgccaggatctgtggtcaaatcatggccacaagatcagccacatagcttaaagggatccaagttttcttttaattcttgttgtccttatattagttcttattttaagtcttttctttccatatttattattttcttttaggtatgttattgataggtatcatagaactaattttttgtttgtttgttttgtttgttgttttgttttgtttttgagacagagtctcactctgtcgcccaggctggagtgcagtggcacaatctcagctcactgcaaccttggcttcccgggttcaagtgattctcctgcctcagcctcccgagtagctgggattataggtgcccaccaccaagcccaactaatttttgtatttttagtagagatggggtttcaccatgttggtcaggctggtctcaagctcctgacctcaagtgatctgcccatctcgacctcccaaagtgctgggattacaggcgtgagccaccgtgcccagccaactaattgtttttttaactaatattagaataagtttacctctatttttatcgtaacacctgagattaccatctactttagttccattttgcattatccttgctcattctttctttcatatgctatgtggacaaagtgctttgcctgtacacttgaatgacctgcctggtcatatggatggataggttaggactgtagatattgctccattgtctttggacatttaatattatggaaaataggaagctaaacctttttccaccgctgaacatgatttactgttttattttgatttctggcagattgcttgtgatactttatctttaaaatacagacattttccagggatacatatgaatgtgcttcttttgttattattatttttgggtactctgtctttatagtttctatactcagatctttttcatcctgagaaatgagaaatatttacaggatgttctactgaactcttattttgctgttttattttatatctatctactatatctttacgctttgtccatttgtcctatccatatgttagagctgctcttttgtcatgttttatcacctctctcttcacatgaacttggtgaggtgcctccaggcatcgctgactttgcattgtgtaattcactgcagctcattggtgtcctggtggtgttgagacattagtcttacagcttgcttctgccccggataacacagctaggtttagggtgttggccatttacttcctatgaggaaaatatacacatacacagacccatatctccctgccagtctgtttgatttagctacatgggaaactgaggagcttttggattgctttcaaatgctgctctctgcagtggtgcagtacccatactctcttcttctcgtccttctaaacccaggaacaagcatggggttcttgcagaggttccttcattcatttcccagtgatgctgcgttttctcaggaaagggaatcaaaggataatgccgcagcttacttcaatccttaacccactggtgttccttatttccagttgctaactgtgttgtaagggtcccaccccatcctcttttaaaatttatttgataaaagcaagaaggtcaggttaggtacttattattatattgtggccttaaccaaagtatatgacctttatttaaatatatatatactcacatacacacatgttcatatctatatctatatatttctagagggagagaaaaagagagggggtttattgatgaagaaagcaaaataaatcaacaagtggcacatctgaacttttgctttggctgtttgacaagcataataccagaacgttcagttttctcaattgcttcatctagctctctgatctcaatgcttaggataaaccttttctaggaattcaccaactgtctgatacaatttcaagtcccttccttgttagagtaaactgcagtaacaccaagatgaattttcaaaccagaattacaagtaccagaggtcttccccagcatcaagtgttactcatcagctcaagggcacaggtaatctcaaggctctggtgaagctgagagaggcccaggactgccagcaccacacaccaggttctttctggctgcaacaggatgctgtctgactccagagtaacagaagaagtctctaagggatgttcgcagcccccatcgcttacacaggaaggagctgcttcagtcatgagatagccccatttgacactctgatagctacataactgacatgaggttttcctgctgccctatcctgtaaagccatcgatttccaggacttgtttaccaaaagccatcaaaacggaccacgtgccatctgctaatggactgccctgctagtattagccaggagattggtatttgcacatttataagatctcactggatctctcttgttgaaagaagataagaaattccgagtctgctagaaagcattttcttgccataaatatatcaactttgttagacattcacttatgtcagttactaattcaaccacgttactgctatgtctagttcattagacaggtagttagataagtgggagaacccacatgcattaaatgtagtttcttgttctaatgcagagtgatcaaccctaaaaatgacctgctaataatataaagtaaaatatctgtagagacattataaatatctacaattataatttgtgctgagctatttaaataaaagaacataaggattataaaccttgtcatatgggttacaaagcatttcaaagttactttcaacgaaattctaaagacagtgaagtcagatgattcttaattcagtagtcttttaatcaactctttaggcatggagtaattgattttgtctacagtagcttttatactaaatgctgttccttatttttgttttttctgctgagtaagatatcccttctgaagtttatgagatagagctgttagatgaaagagaagcctgaaatgttgactcatgtaatatccatgctctgctagatgaacttcttcctagagttttaaaagggaggtcatggagacactgagctctaagacaaacttggcccagccactatcctgtccatcattatttctacttcctttatgtccaaaaacatcaccatccagatgtgagcctctgggtctgtttcctttgtcttgctagggaagacgagcacgccctcatccagcagtattgccaaacactcggaggagagtccccagtgagccagccgcagagcccagctcagatcctgaagtcagtagagagggaagaacgtggagaactggagaggatcattgctgacctggaggaagaacaaaggtgtgctaggcctgggagaaggaaatatgtcatcctttcttttgtatgaatttcactgtagcccccatttattctctttttcaagactattgtctaagaaatctcagtggagtgaaaattttagaggctattaacaaactgggatgctggctgcaatacagcagcatttgggggttcattgatgatgtctactgggacacttgcttaaaactacaattttattcctgcatgctcatcctgctattaatacacatttttatataagaggaactagcatgagctaaatttgaacctcacagacgattttggagagacgataatgcacgtggtagtcattctgtttctccctctttctgtattagaaatctacaggtggagtatgagcagctgaaggaccagcacctccgaagggggctccctgtcggttcaccgccagagtcgattatatctccccatcacacgtctgaggattcagaacttatagcagaagcaaaactcctcaggcagcacaaaggtcggctggaggctaggatgcagattttagaagatcacaataaacagctggagtctcagctccaccgcctccgacagctgctggagcaggtagggtgtgtagaattcagcgtcacacctccccaggccatctgtccactgccctgggagatgatggtccaggtgtcaggagaggcagagaagtccactttcaatttcttacctccgtagttaattcagactggcttagaaatttccttttacatgtaagcatataaatcctcattggcacacaaaaatgtgtttgcccagcttacaatggaatttcccagtcttctttaacaatgaagtccgcctcagctctgaactgtttgagagaaaatatcctatgacatatatcttcctaaattatacatgggaagcatctgtattaaggaacagcaagagacctgaaatcggcattctaaagctttcttccagtgagacaagaatgctgactccaagaatcattattttctattctcaagaaattgagttaaagatggttattaatttgctactattatttcctaacactggaccatgttttatgggagttgcttgcaagctttctggatgataagaaatacaatttacattaagatgaatacatgcatgtatggagaatacaaaataatacttgcctttatagagaaatgccagctcttattttctattttccctttcttcctccctccctttcttccttctgtttttctttcttaatgctggtcaggacctactaaattgattctataactcatcggtgggttattgcattcagttttgaaaaacactgttctttgagatataaaagaagcatcaatacagtttctgcctttctggtgcctgccatcttgttagagatcacagcaagatactttcatatgtgaagacacagcacactgtagggaattaagtgcttgatggcacatagtagttaggaataggagtgatgtctcagaagtagtgatggagagacctttgcagcaggtgcagagagcgtagagtcccagcacaggggccaagagctcctctctcttgaagaatccctgacatcaacatgcatgtcatctttagtctttttctctagcctgtgctgtgtggagctcctatgtgatataataggagtgcctttctccagaaatgatttattgactcaaagcaggaacaactttctctccagtgattctctcaaattttagaaaactgccttttcacagttgctctcagtctttttaacttaccagaataattcaaaacagtgtcatttctgccttacctacacagaaatttgtgtaggcaattcataatttgaccatacacttttctctatgtctctcagtgtttcagaatttgggtgaggctgttcaatggaaggcttacttcagggcctctcaatcccacaatttggaaagtaagagtttcccaagagtgacccaagacgtgggtttcttgaagcccttcggaatgtttgagtcttacttagtgccagccacatacattgaaaacgttacatttttcattccgcgaacttgaagtttccaaatggtgctgtgtaagggatggattttctcttgcaatctcttgtttagaatatgaagtgttagtgttaacaacttagtgcataggtggaattgctacagaaggaagctgtgctcaaaacctttatttgccatggctggttgatgcccacaggagagcaaaaggcttttctgttcacccttgccttcccctactccctccatcccattagacagtgctgcctgatggctcatgtgccttgagaatcacatagcaatgcttttagagatagctaatatccaaatggcttctatatccaagactgcagagctcttatctcttctaaacaatttaggatgatgaatgctagaagtagatggaaaattcaactctaatagtaaaaactagcagaactaccaggcttcaactaatatagatttaatggaaaaatctgcatgaaaaacttgtaacatctgcattccctatatgatggctcacactttctaatttgaccatatatttgtcagcgtatccatattgaagatttgcgtgagtgcctttacgaagtatttactaagtgtcaggctgttctaaccattttagaaatagtcattcttcactcccctcacaaaactctataacacagcactattattaccctccccattttacaaataaagaactgaaagcatggaaggttctacagttttcccagaattacacagcttatgagtggcagagtgggaattagaatccaggcaatctgaatccataatcatgcttctaatcactctctcaatattgccttggagtatgagctgattttgaaattggataaatttactgtattagaaacccagtgctgatgtttaaaatatgagtgaactatgcttatgaattcacttaacattaaaacaacagaaaaattgagggataaaaatggtgttgataaatgagtctggcagcataaccaagtggattcttcaaggtgtccaagcggaaagagaaggaccaaagcccccaccaagctgatgctaaaatgtatggaaaacatctgaaggcaaagacttctatatgatttaattatccatggtgagggcggggaagttaaaaaggaaatgtttttccttatgattatttgaatcctttctctgctttaacctctgaatgtggttccagcctgaatctgattcccgaatcaatggtgtttccccatgggcttctcctcagcattctgcactgagctactcgcttgatccagatgcctccggcccacagttccaccaggcaggtcggtgtccccagcacacagctcctctgctgagtctgctttgtgctttgccattagtttgtgtttcctgttaagtaacattcctacacactggtgccttaggaagtaaaagagttttttgtatttggtcttaaataggtgcaaatccatttcaacaatatcaaaaagcaaacattttcaaataagctataatacacttgtttatataatctgtagaagtggattgaagtttggatgaaaaagcctcctctgccctttagaatgagcaagaaattaaattatttgcttatgaatgatttttttagtacactttctgtctctaaaatgttacattggtgcatattcaggactaataatattacaccaaacattatggttgtatctgccaaggtgtggaaactcatttattcacttttcttcgtcctagtccacttagacattgtcttgcctgtcccatcagaggcagcggtcccacgcagcctgtccttggtcacaatggggacctgtcactgatgctaggaaggactcagtaaactaggtgttaaccaatgacattttgttatcaattaaattaaaattctagaattttactgagaacgatatattgtaaccaaattaatttcttggtgggatatcttttggtacattaaccagaaaaaaattaaaatattagctggatgcagtggctcccgcctgtaatcccagctctttgggaggccatggtgaaaccccatctctactaaaaatacaaaaattagccaggcgtggtggagcactcctgtagtcccagctactcgggaggctgaggcaggagaattgctggaacctgggaggcggaggttgcagtgagccgagatcgcaccaatgcactccagcctggtgacggaggctccatctcaaaaaatatatatattaaaatattaagattattttcatattttttaaataagagaactatcttgactatggattataggataaaaaacacatcctagtgaaaagtatcttaaataagatgcctttacttttgtggcaggataagctggcctaagctgaagtctccaaaaagaaaggaggacagaaaaagaaattggtgaaattttttttgtatgaaaacatacctgtggtgcaaaaataatagatttctcattcaaacactgaaataataagaccatattacttgtttttcagtctcatatttttcagtcccctggtgtgtggattctttctacacaaacaaacagctagtacgtgtcaattatgtaaaattatattaccaacactcaagcaaaaatgttttgggtatattcccctaaaattgtcctttgcaatgggaaatcttttcacattgatatttagaggctggttggagtatttcctcctgaatttgggttttagtggaaggctagacattaatttgagaagctttgttgttctctttatttgctgtcacagcgggagaggacctgctggccccaccgcacgacaccagcacggatctcacggaggtcatggagcagattcacagcacgtttccatcttgctgccgtgagtatgaaagattgcagcaccacagctgcacgtgttccttccctttctctttttctgcatgcggcccttcgccttcttccttaagataacaaaaaccttattacaaacaggactgaatattatttgaaaataaggcaaacattatataagaaaatgaagctcaacctagatactatcaagtaacgggggtacagtcgcaacgcaattctgctctttgagatttttcaatatgcctgatgggtgataaaatgaaagcaaataaaataataagtctggttttaagaagaaattatcctcttcgatgcaagctatcataaggaacacatcttagttcaaagaagagctttcagtggcatgccaaacaaggcatggaaacagcctttctagtgtaattccctctcttttcttcaaacattgttctccaatgtcatcagactccagtgcagaaagggattgttttcagattttccctttttattcccgctggtttcttttctcatggaataaaatagtcattgtataaaggccaaacaatttaagtcatcatagattaggatcctgtgaagtttccatctgaacaaccaagagccagaaaataaccaaattcctggggaaattatataataattcttacttattcattttttccaagtgttttgtcttcagcaccttgccaccttgcaattttggctgagctctcacctaaaacacttctggtgtttctagcagaatatatacatacaagtaaactgtatatatgtatacatatatatacacacacacatacaaatatataaatgcatataaattacttagtactataattatattttaaataatctttgacaggatttgaagacattatttgtaattttagagagatttactctcaaactgattttaaatccagggcagtcactaaaataagaattcatgtaaagcatagcctcttattttacccttgtctgtcatctccttagaaaatgccatcccaggctgggcacggtggctcacacctataatcccagcactttgggagggcgaggcaggtggatcatgagatcaggagttcgagaccagtctgaccaacatggtgaaaccctgtcgctactaaaaatacaaaaagtagccgggcatggtggcatgcacttgtaatcccagcaactcaggaggttgaggcaggagaatcgcttgaacctgggaggtagaggttgcaatgagccgagatcgtgccaccgcactccagcctgggagacagcgtgagacttcctctccaaaaaaaaaaaaaaaaaaaaaaaagccatccgaaatgatgaaaaagagattatcaattatcaggagtgtaggtaaataagatatattgacttcatttaaagattattatttactgtatagaactttgtaatttttaaaataccatcattagcagaatgtgaaaacagctatttaaaatatatttctggcccaggtgcggtggctcatgcctgtaattccagcattttggcaggctgaggcaggtggatcacttgaggtcaggagtttgagaccagcctgattaacatggcaaaaccctatctctactaaaaataccaaaaaaattttccaggtatggtggcacaagcctgtagttgtagtcctacctacttgggaggctgaggcatgagaatcgcttgaacctgggaggctgaagttgcagtgagttgagatcatgccactgcacttcagcctgggcaacagagactctatctcaaaacaacaacaacaacaaaataaatgaataaataaaacatatatttctttgtgaattttcaggaatatttgcctgaagattatattatggtttccaccagcacatgaatatatctatttgtgttttgccagtgtttcccaggttttcatttgtagatctactataatgcttctcaaagtttgcagaatcacatttacactacatcagtctccacacccacctccccacctccccaccccccaaagcacatgcatgcatgtgcacacccatatagacacacttttggcttttagagtctcacaaaagcttaagaggatcactgaatgctcacatgctaccagattgttgcttattttctaggctctgtaaccacagtaatagataaactgattaaaactagtttattaattataattcaaggtcaaatttatttagaggttttgattttcaattgttatgttacttagtgagtagataaaatctcatcatagtctttatgagccagaattaaattcttaaaggaaattactttttagttcagcttatacctaaataaccttaataattagttaaaaacaaattctgtacatcaaagctgtttagaagtttttatttaaatatcatggacattttcaattgtaaaagtcagttggcagtgacagccaggatgggaaatgtgtttcaatatacaccttgtaatatatataaaatatataatttccatattaaaaattttattctaaaaatgtgggattttttccaagttccatttcctaaagaatttactcttaaatttttctcaaagtatactctgacatccagattttacaaaagctggacccatgtcattttaaaacagaacattattaaaaataaataatcataatttagagcaaaaatgaattgtaacaggtaaatgtatgtatctctttttatggcctcactttaaaggcaagtataaaattcctattggttggggatcttgttagctgttcattgatattggtttctgagaggagtatacacagtaccttcaatgggacccacatcacagagattcatcctctcccctgcattggtcccctcttcaccaatgtcattctcagtgttcagagagtggtttatggagccctgagattccttaatgtttattaagcttgagtcacattcgtcaaaaactcaaaacctactgaaatgcaatgatttccttttaaatatgtttgtatgtaaaatacccttagccttctatctgataaaaagctgttggtttaaaagtattggtttggagcagctggcttcatgttttcatagtgttaactatgcacattcacaaatatttataatagtcatagttttctgaatgagcattactagtcatgtcttcttttcaagaattcaagcacatccatgtatgaaatgatgaaaagtgtattttagaatcctttgaaatctccatgttttaatttttggcttctgaaagttctgctattcatattttttctctggtattatatacaagacagggacagctttccataaaaataaaagctgtattgacttatttataaaattgatacatattttcatattctgcctgtaattattaaaccttttaaaaattgatgcaaaatagaaatcagcgtgggaggtagactcagtgcccagtgcatgtgtctttctctctcttttttttttttttctgagacagagactcactctgttgcccaggctggagttcaatggcacgatctcaggtctgtataacctccacctcccaggctcaagcaattctcatgcctcagcctcccaagtagctgggactacaggcacatgccaccacgcccaactaatttttgtatttttagtagagatcgggtttcaccatgttggccaggctggtctcaaactcctggcctcaagtgacccacccaccctggcctcccaaaccgctgggattacacgcgtgagccaccacacccggccccaatacatgtttctgacttgagtgaatgattacattttctagctgggaaggtttccttgtagcattcctagatagtactcagaacgttttgtaggattcatttgttcttttgtccctttaaagttgctcagccagcaaatattttaataagcctttgtgattcccaaagcttaccaaccacctttggagaatttatctaaacaaatcggattggcaccctcccaatgccaagccaatcccttgagcccctgtaactaatgagaactttaaaaatgcttgtcgccagcatacaatgaattgatcttcatgttaatcttgacttttgatcctttgtggattaaaaattagcatggccccaaatgaatttccactcttggcaatcttggaattaaaatgaaactctgtattcataaatcctaattgtgtgaattgcctattttaacatgaccgttttttaactgtgtctacacattgttgcacataacactttagaactcctttgtctgaattaatatcccagttggtcctgatagcatccttgaattatggccttttaaagtctttttaaaattatttatgttgagtcttagagcagagaagcagacatttccttcacttcctggcaaggagttaaggaaaggggtttaaatgtactgccaattaacaagtgtacttactaaaattcccactgactgcagtaactatttttattttttggtataaattttttttgtccattttttacttatgtccttcaaatgtatgaaatactggcagtaagccaactaatttttgctgatagaccaagaaatgctttcaaaattatttttgacccacaggcatatttttactatgaattgcctatgtttattaagcttgaatggcattcatcaaaaacccaaaacccactgcaatgcagtgatttcctttttaaaatatttttgtgtgatttgttcaggcaaatacccatagccttttatttgataaaaggctgtaaggttaaaagtattggtttagagcaaaatggattagacttctgtctagggtttggctatttgttatatttgttacttgcaagagaagcataactctgtctgttttaaaaagagtgtgtaaacctatggtgtacttaataataattcaactcagctatcccttggacactgtggaggtccactcttttctcctggatgtaacttacagatctgttagaactaggcttcttttagcctgatttctcccccaaataccgggcctcacactttccctccagacgttataggaagggtactcttcatgcctgctctttttttctcacatagctcccagcacacagcacatggtcactgatgtcctttctcccactcagcatagaacagtgagagatggaaggagtgcagcatgctagatgactagggacaacttttatttgaccaagaacagattgttgccattactgggggacagatctcctcttttccccccagcattgagaacgagatgatcatgtagcaaaagaggggacgaaaagcagatgccttagagaagagatggcagtggctgcccttgcaaagcccgccagatcgtcttcactgttatgggctctggaaccaaaaaggaattgagctatctgtgtggaaaggagaattagatgccatattctaacttctccgttgttcctaactgggcccatccaagggactattattatcccaagtgtccagaaggacactgaggattaggccagcactttccttgatgcaagtacttggccaccattttcctgggcgttagggtccagggtgtgtcaagggtgggtcaagagaggcagaaaccaaagacttatgccttcagtggtcccttggtcagaattagtactcagcaaagtaagtagaacatgctctgttctgatacataaaccaaatacacagtatgatttaaataggaaatgagattttttgcaagactaagtgctcagtgaatgctttagtgtatgcactaaatcttaaatcacatgggatatgagaaactaaccaggaaaactagccctcattgaagcattaagccaggaaaaaaaaaatgtgtttcttgtttttcctattagcatccatttaacaactgggctattattaccctatgtagagtgatactttccacgcatttgcatgcctgagagttggaaccaacaaagtaacaggactgccattaagtgatttcttttgttttctctttcagcaaatgttcccagcaggccacaggtaagagttaatggcttggttggctctatgttactgatcccaacctagagtaagcagattatccacgactgattttattcctactttattctccatgtaaataagtaaacttacttgacatttaaatgttagttgattctgtacaacagtttgtcagtctgggagtggggggtggctcccaagccacagataccaaaaataccatgtgtttgatcctttgtgttctaacagctttttaatggcatcttatgtgctacataaagtcactctagatagatttgaccaccactgctctctcaaatgtctacttaaggtggctatcacagaacattgacctaaaaaaaaaatgactggtaccacagaggtggttttgttactttgcaggggaaaatatttcaattttttacttaaaaattttgctgagaactgttggcagctgtacccttatgccttttagtattttctataaaccaaaaagtgtatgagacaggtttactttgccaaggttgaggacacacctgggaaaaagagagataaatttcattaggatttgtagcctgttttgttttgtttttttgttttgttttgttttttgtttttgttttttcccaaaaaggattttgagggcttcacagaaacgaaagagcaggcaggagggggtggaggaacagtcaattatgcatttgtcttatgctcagtaaatctgcgttttatataattaagataaggtatgcctagagtagaagaagcagtcaagtacacatttttctcagggtgggaggagagatgacttctagtcctgcctttgtcctgtaaagataagctgttaattcacattgtcagggtgaaattcaacaaaactctgttttagggtaaagatttggggacccttagaaatttccttgtgagcaatttgtgagggaggtcactggccttctatctttgcaagtagctgcttaggaaggtagtttttgtgtgactcagttcccacttttaatttttccctttagcatagtgagttagggatcctgagattttgttttccattcacattttcttatcacatacttttagtaataatgtgccacaaagccacagcagctttggagaacattttctttcatgaacttgtttactaatctttttgaaacaatgagccttctgaatgattgtcttattggcaagagaggctgggatcttaactaaaagacaagggtatgtgaagtaggctaggggtgtggtgagctgtgggtgttctctcctgcttgcttctgttgtctaagtgaattggaagccgggactttagcagggagtgaggttggggaggaggtgtcagaagtgcgaggagagactggaggatgtgtgatagcttcttggagaatagaagagcagatggcctgggaaatagagtgtgactataagcagcattaaaggtgccactcatgaatttaacatgaggccattctgcagggttgtaagttgccctctaggcatattcacgttcatgagcacaggcaccagaatgggctgagtattggcatttaaaaagttgaagttggggtttgacaaagtgagtacagtgattcaagggaagaggcaaagaagtgattataatgattgaaccagatgcttaagctcagtagtgaaaggaatgaggaaatgtccagtgtgggagacagaaataaagatgggaggatcaatggatcctattgtcaaaggatggataaatttgcagttgtaggggaagtaagctgtggaggtagaggtggttgtcagaagctaggttgaatgatactgaaattagaggggttgcaagtattggtaatggtccatatttggacctttgtgtgaatggctaagaaggttggaggacaggaccattggaggaaaagagcctaaagaaccaagaagccagagtgctggaagaatcatctccatgggtgttgaaatcactaacatttaaaaatggctttagagtaggggactttgagccattttttacttcaagaagtgaaggaacatgacctacggagtcagtagatgactgcataatggagtcatatagtctgatgatatgagattcaaagctgggtgtttttagggagaggagaaagaagataccccagaggccccaatgaggaccaaggaagactcatgcagtgtatgaggaatgggggagaatggggaggggaagtgctgtgtgagagggttatgagggaagctgtgtcttcaggtagatgcagatattgattagagcaagtagatgcaggcagcattcagagaagggtttgggaacatgggttttgcggatcacaggccacatgacctataggacaggtttcaagagctaggaagagtgaggcatagggtcacaaaaaggggtatgcagatctctatatgactagaatacaggtgatggaagggcaaccaggagtctagagctttttagggtggcccattaaaattagggataaagggtacaaagaggttagtcctgatggtccccaggtggaatgaggctgtgagtgacaaaggcaaggagggaagagagaatcttttaaaatcctcagatataatacaagtgctcagaatttaaagcagaaaattatctgaggaggccttctcctcctactctgtttctagattttagaaattgagtttacaaagagctaaatggttcccagttgtacagcaacttagtggatggagcaaacatgtaactcaatacaagaggcccctttcccattttcttccttccctttccatgtgttttttcctgctcttctcttttcttcattttttcatgtcttgggtcgaatggaaattcatgaaaagtatatattttcacctggagggttgggctaatatttacatagcatgatcttaaatttttagaattctgacacctaaaatgagcagtattgtgtgtccaattaatagacacatctcattctcaaggataatggagtatataggcacaattcaaaaatcctcttggctttatatttaacatgaatcagcgccagagtttcagttatcaatattaatatgtaacaaaatgttcctttctcatatggggttaatctctccccttctctgtcctcaaaccacttctttgaatttactgtggccggcacttacctcatattacaattgaatgaggctgcctggctgagatatcttccacacctgcttcacaggagggcctcccctcagtacaatgcctggaacccatcagtgtttgctgaatttttgctccctctaacatggcaatcaaatgttcaaaatggagaagcaagtgtctgaagaatccaaatttgaatagtcatggagaatgggctctaggccagagtcaaatgagtttgctgctttcagcatacctgggaaaaggaggggctccgtgggcagtttttccagtggcttcattaggaacatgcttccagggagcaggataaagtcccccataaaataaggtgtaaagacagatggaatatctttcctgagggtccagaaaggccttttatgatttatgaggcatggaccagtttggatgatttcattttagcactttttttttatttttttctaatttcaaaatccttttagaagaccaaatgtttgaccttcccttcaaaaggttgataccacttccatgagtgtggcctggatttatattgtctctgacctgggacatttaactttaactggcaccactaaacacccttgggttatgattcctgccttgccttcctcttctctggactccagcttgggatcaagatggttggcattgttagggtaccccctctacagatgacctcccacagtcccccaggaagacatgggatattttcaccagcctcattcgctcaccattggtaccttcagcagaaagaaatgaagtcctctccattttaactttgcttccagcctggccaagagaaaagactttcagacttccctctaaatcagctgcagtgatagaaagcagactaggtaacttcagcatgagagggagggacctcattgcaggaagcaaaagtcacagtagagttaagactcttgaaagaagcacttttattttcttgaagaattgacagatctctgcttcctgtaatgttttgtgcaaatttctgacagtgctattttcccttcccataggcaatgtgaagtattcatccggccaaccaatgtttcctgacgtacagtgttgcccttttcagcaaatgccaattccaagttccattaaatcagaagctccatggctccttggcccacgatgttgagtgctgactgtgtgttctactgaaagagtaaaacactgactatccaaagagaaatggatattttgtttttataataaccatatattattgttttcttcttccctttctatgcaagtgtaaattaatgaacagagaggtatttggaaatggtaatacatttgtcacggatttgtataatgtatacagcattgggaaagtgggtgggggctttctaatatgataccgtctttttaataactatgacaaagcttacataagaattagaagaccactttacatttttacattccttctgctgttcatattaaccttgcacaattacttcattttttctttgactcttttaccacaatgttttggttatttataatttatcagccatatgtttatcagccatataaccaactagatcccaaatagatccatgtatttgtttccgtgatttggccacattaataaattcataaatttcaatcaaatatcttatatatacacacatatggtttaagctacagccctgtgtatgccgtttaactttatttgacgttgcccacttacttctttgctgaccacttggataaccgtaataaaaatcctataagcctaaatggcatttcttttgggatatttttcctgcattttattccctttttatataagtaggaattaattatttattttatgtcttaatctatttgataaagaagactacattataataatctcaaagatcatattaccaaaggttgcccacttgagcatattttcattttgacacagaaacaaaatttagtacaacctttcctagttcccatgtcttgattttcatcattacatgcacagcagacctttacctattgtgataccagaacacatcattgtctttggttcccttcaaagagaattttattgttgttttgtattttcaagtccttaatagttcttgaaactcctagttgttttcttgttgaaagcagacacacatttagtgcacggcttattttacctttcgggtgaaagatcagatgtttttatacccttcacttgatcaatatatttggaaagaatgtttatcaaaagtctatgtcactgcttctacagaagaatgaaattaatgcttaggtgatggtacctccacctacatctttttgagtgcattcaattatgtattttggtttagcttctgatttaacatttaattgattcagtttaaacatgttacttaattagcaaatgtagaggaaccaaaaaaaggtgaaaataatatgttttgattcaaacctaaagacataaaaacataaagacattttaactttgggttctctttagctgggatctggccagaaggaggcttaaagttagaaattgctattattttagaataggttgggtgggttggggggcaagggtgtctatttgcagcagagatattttgaaaagaagaaaattgttttatataaaaaggaaagccatgaccacctttctacctcagatccatcttcatccattgcattggaaactgctttatgctgctgcagtctgcaaagtctagagcttttatcaggccatgtcatacccaagaaagcacctatttaaagaaaaaacaattccctgagctctcaactccaagttgtagatttggtgtcttccttgttcttactttaaaaagtcatgtgttaattttttttctgcctgtatttgtatgcaaaatgtcctctatctgctattaaagaaaagctacgtaaaacactacattgtaaccttctaagtaataataaataaaaagaaatatattgcagtaacaatgggaagtaagtatgtagttcttttgaaatatgtggtaaagaactaatcacagactatcatctaatctggttacatattgtatttttcatcctgaataaaagtaattttaacacaagatgactttgatattcttcagctggattcactgatagaatgtgagttttgaatgcacatttatgaaaacaagatatagagatagcctgtgtcctgatacatctacattttttcctgcagtttctctcatacacactaatacagtctcctgttgctctcattctctctctctccccatctcttacacatacatataattatatgattctcaatttattttccagatagaaggtttattgatagagaaaagtaatattggatgtaaaaatgtgtacataaaacctgttgagtgttttaataactagatgctgttgacattaagttcctttcaaatgtacttttagtttcatgctctcaaatactgtatgctttttatccgtacactggattttaaccactctagtaggtttaatcaatttctgaagccattcagtgggaaacaatgttgagaatcatgttgctttattctaaaattaaaagctgtctatgaactagaaaaatcatctaaaatataatttgttaaaataaagaaaactgatacattctgatgaacaaacattttaaacatcctgtgtaccactaagtaatgctgacattaagcattcctgaaaaaacacttgatttccagcaacttgttgactaggtagctgaaaatagaagtgcgaacaaatgaacaagttttgctttcatactgctgtggtttgaatgtgtcacccacagttcatgtgttgaaaatttaatccccgattccatagtgttgaggggttggacctttaagaagtgattggatcatgaggtcagaggtcatgaatggattaatgtcatcacagaagtgtgtttgctatctcaagtgggtttattaccaaagcacgttgggttctctcactttctcttgcatgttctctgccctgtcaccttccaccataggatgacgcagcaagacaggccttaccagatgctggcaccttgatattggacttcccaacctccagaacgctgagaaataaatttcttttctttgtaaattacccaatctgtggtattctgttatagcaacacaaaatagaataaagatgtatactgtgccttcaagttgttatatatcacatatatatataatatatatgttacaatcaaggcacagtatactatatatactgtgaaggcatagagatagatgatagatgatagatatagatagatagatagatagatagatagatagatagatagatgatagatagatgatagatagatatagatagatgatagatagatagatagatagagatagacagacagataatctttgtagtttgctcctgtgtatcttttctcccacccacattcactgtttcagtatgccagctttttcaaaggcctttctaaattcattagtggagaatttaatgataatacagtaaaccaccactaacgctactacttaaacctatgagtaggatccaaaagcttcactgacatacaatgtcagcttgtgttt

SEQ ID NO: 659 - DNA, 233430 bp, Homo sapiens
  source 1..233430: mol_type = genomic DNA
aggaactgggtgctgcccaaacagaaacgtggactctggcatcagaccgagctgtgcaagggccacgtgtgaccttggatgagtcacttcacatatctcagcctcagtttccacttctagaaaatgggctgtttcctggccagagctgtaaggggatctctgttctctctcatggccctgtggcaggagctccagcagccaccgtggaccacgaggcagccacaaggagggaagggcatgctaaggacgggagatcagggaggaggagcctctgaggatgagggatcaggaaggaggagcttctgagaatgggggatcagggagaaggagcccctgagaatgggggatcaggaaggagcagccattgaggatgcaggatcagagagggaggagcctctgaggacggaggatcaggaaggaggagcctctgaggacgggagatcgggaaagaggagtctctgaggatgggggatcaggaagcaggagcctctgaggacgagggatcaggaaggaggagcctctgaggacggcggatcaggaaggaggagcctctgaggacgaaggatcgggaaggaggagcctctgaggacggcggatcgggaaaggaggagcctctgaagatgggagattgggaaggaggagcctctgaggatggggaatcaggaaagaggagcccccctgagaccaggggatcagggaggggggagccagggttcctgatggctctgggaccagggcaaggcaaaggagctgctgcctctggatggtcctccatgaggggaaggagaaataaatctctcattttctattttggttttctctatcatacaccacagaacccaccaaaatggagaggttttttttttttttgttctgttttgttttgttttttttagattcatggtcttgctctgttgtccagtctggagtacagtggtgcaatcacagctcactgcagcctcgacctcctggactcaagcgaccctcccacctcaccctcccgagaagctgggaccacagatgtgcaccaccatatgcccaactattaaaaaaaaaatgttgtagagacagggtctcgccatgttgcccaggcgggtctcaacttcctgggctcaagccatcctcccacctcagcctcctacctcagcctcccaaagtgctaaaatgacaggtgtgtgccactgcactgaggctatttttatcttcaatatacatgtaaagaaacaggggctcaagaggtacccaagtgatggggcaggaattagaatcccatttgtatgcccgatgccacctggagaattccagggcaccgcatgggaaacccagggtgctgtgccagccgggaggtggccatggcaccattacctccgtatctctcagaccctgctgcggttgggccaccctgagatccaagcaccccagtcagacagaccctgctggacttaggcggaagaatccagccattccctcctcccctggtacgaaaggctgaccactcctgcagaaaagaactcaggtttatttgcaagtaaaaaccatggtctgaaaaaaacccattggcaaatgtacagtttgtgtccatttggggttcccgccagctgggggggcccccagatccctgacccacatgcatcgggctcccacatgttcacagctaatctcaggcccctgcagtttagccccctgcaggggacaccccgtctcctgctgaaaaccatcggactcccaggctgcacccagccctccaaccctcctgccttagtgcagtgcaaaaaccaaaccaaacacaaatctcaaaacaaagaaacacaaaacaaaaaaattcacaaaaaccagggttctaaattattttttctcagtgtccttcgtgatcatgatgacttatttgtcaacaaactaaaatatacatcattttcttgctattataaaatctcttattattcacagatatataacgggagatttggatgaaataattacaaacttttttccccttaaaaaacaaacaagccaaacaaaacacaaacaaaacaaaaaccccaaaaccaaaacacaagacctttctgacgacagtaaacacaggggctgctggcttcctccccgccatcctccgcgcctgctgggccgcaggtcgcaaagtgctgggtgtaccccgacacggaggccccagggtgctctctccaaggctgactcttcgcttcccctgccctgcctccacctcccctcatttcccaagcctttgtcgagggcccctctctccccctgccgctccccatccccatgactcctcccgcctcttccctacaccccagaggcatacagcccagaggccacaaggccaacctcagaaggagcccctaggtccccagcgccacccacagcagggaccagcttcccccacacccagcctgggccgggcacctcccacaggctgtgcagctggccagagggagaaggggctacaagaagcccaggtctcaacagaggctttggcaaggagctgggagggagacactgttaccaggtctcatgcaacatcagggtagagaaaccagggtctggctaacccagccagaagtcgaaggccaggagttgtggctgggggaggtaatggggtagagccacccccaagagcacttattttgagtcgcccgaggcccagtttgtaggctgcaggggcccttggaaggaagccctgccaggggctggaaccaacctctcgtgccaaggctgggcagaccctcagggaccacccttcaggagagcagaggggcctcctggagagggacctggcagggatctagagaggggaaatccctgttttcttccctgcccatttcagggtttttacaaaagatgtactgatctggcagcgcggccaggcagacaccttcccaggactccagaaagggcctctcagagagagggcaggaaacggtaccgctgaccgggcagcagggttggaatttcatcattccaaaggcccctcccaagagaggggcctgccgtgtggggtccgggtgtgcccctggcaaggaggggagtgggggagtcagggaagtcttgggagccagagtggctgcagagggcgaccacagtgctctctcctcccgcgccctagcacagtggggcaagtgggcccacagtgaacagcctggctctggtcccgtctgcctcccgaggtctgacacctccccctgggagcagcaggaaaagacaggcaaggctgagtccaggggctgagcagagggtgtgggggcaggtcccctccgatgtccctagcccttcctgggacagcatctgctgttcaaacctaggctcctgaaggccatctcagttggacaggggcaggcgatgggcctctggcctcagccactacccagagcctggctcgcagcgctgtcggtgccccctcctctgcgctctgggtggggctagcccaggtttcctctatgtacaatagcatacccagtgatgggtcgccgagggcaggctgacagtgaaacggttcgagtttaggattctcaacaccctccctatccctgtgggcagtggaagactgggaggttggtatttcccctctgagtcacagaggagctagagacagacttcagggctggagtgactctcccaagaaaatctgcgagtcttgtccacgttcctgccgtcactggatgccctcctcttctacgtacgttgaaggaaaccagccaatctgaaaaagatggtaagatcgtgtctgtgtgtgtgtgtgtgtgtgtaagcaggtgtgtgcatgtctatgttggggtgagggcaagtagaggctcatgaagatggggggcccttcggaagtccagagttctcagaaggacctggtggaaccattgcctgggagtaagagcaacccagaaaaacaccacccttggccagtttaagatgatctgcccaccctccagctgccagtcagaaaaaaaataaaccctcctgaggaaaagaacatcacccagaacaactacagctttttcttaatacacaagcttggcattcagtcaggaccaaatgacaaaaaccaatagaaaaagcagacagtagaaatcaacccacaggtattgaggtcatctgtcaggggagattaataactctaattcatacgtttaagaaaacggatgaaaaggcagacaattttaccagagaacctaaatcggaaatcaaatagaaatcctagaactgaaacatacgatgaatgaaatgaagaatccaatagagggatttagacaaagcagaagagaagacaaactgtaagacaggtcaccagaaagtgactagatagaaaaccagagagaaaaaaggatgaaaaacacataaaattgtggaaataatatgaggccatggtaaaaagttctaacatccttgtgaatgaagtcctacaaggagaaaagagagaaaatggaacagacacacagtctgcagatactatgctggctgagaaatttccaaaagtgatggacatcaagccacaggttcaaaaaaatctctgcaaatcctaagcagaataaataaaaagaaaatcacacctaggcagattatagtaaaatgaactcaaaacttcaaatgaacttcaaaatgaactcaaaacaactcctcacaaaaaggaactaggtctccttggaaaaatgactgattcctgggggacgatgaataagtacaggagaaaagaaagttttccttacagtagaatgccaactaatatctatagatagtcaaaaaatcactatttttcagccataatagaaataatagaatagataaaattcatcaagggaagataaaactagtacatgaaagtttgaagagaaacaggatatttacctaacctcaaagtattaccctgcaaattacttgctaattacagtcaacagtaacttcacagtagaacatagcaaatataatcttaaacacatgatcaaagttaatgtcacaaataatgagacaaactggcataattcatgtcctaacaggacactacggcactgagaaagtgccaacgtccccattgtggtgttcccaatggaacctcaatctaatcatgaagaaacatcagacaaacctaaattgagagatatcctataaaaatagctggctcaaactcttcaaaagtgtaaaagtcatgtaaggcagagaaagactgaggaatattccagattaaagagagttaaggatcacagcaagtcaatgcaattcatgatcctggactggatccaggaccaggagagaagagctagagaagacatgattgggatgactggtaagatttgaatatggacagtggattagataattgtattatatcaaaggggaatgtccttggtcttaggaaatacttaggggtaaagaaatatgatttctgcaatttactctcaagtgagttagagagaaatagacaaacacacacacacacagtgcaaatgataaagcaaatggggcaaaacattcacaattggtaaatctgggcaggttactgacacttttaagttgaaattttgaaattgtacgtttgaaattttgtttcaaaattatgttacaaacattttacaatgtgaatatttaaaaagaaagtgaaataaggatggttttagattcaaaagaaactgagaattcattaatagcagatatgctttaaaaaatatgaaagagaagggatgtcaggcagcaggaaatggtgttgggtggaaatacaataatgcaggaggaaatggggagccctgggaaaggtaaacacggggtaaatctaaataagcacaacagcctaaaacaaaaacaatgtcaaatggtatttctagttctagatccctgaggaattcccacactgtcttccacaatggttgaactagtttacagtcccatcaacagtgtaaaagtgttcctctttctccacatcctctccaatgtatgtttattgcagcactactcacaacagcaaagacttggaacgaacccaaatgtccaacaatgatagaatggattaagaaaatgtggcacatatacaccacggaatactatgcagccataaaaaatgatgagttcatgtcctttgtagggacatggatgaagctggaaaccatcattctcagcaaactatcacaaggacaaaaaaccaaacaccgcatgttctctctcataggtgggaactgaacaatgagaacacttggacacaggaaggggaacatcacactggagggggagggggagggatagcattaggagacatacctaatgtaaattaggttagttaatgggtgcagcacaccaacatggcacatgtatacatatgtaacaaacctgcacattgtgcacatgtaccctagaacttaaagtataaataaatatatatatatatatatatatatatatcccaaaaacaaaaaaacaaaaacaatgtcttctaaggtttgaatatatatagaattaagatacatgagaacgcttgcacaaaagttgggaggaaaatggatgcaatcaaaagtcgcaaggtccttccttgcattgtctgggaaatagtaaaaaagtactcatttaaggtaacctctagtctaaggttaccacttaagaaaaaaagtgtgtaactaacaaaccaatgtagggcaggggaagtagaattaaaaatatattgattaattcaaaagtaggcaggaaagaagaaaaaaggagtagatgtgacaactagaaaataaagttagataatttaaacccaaacagctcagtaattacattaaatgtaaatgggctatatatgcctattaaaagccaaagactgtcagaccagactggcttccccaactatttataagaaatccattttaaatataaggaaatagaaaagtttaagtagtatgagagaaaataatatgccacacaaagcagtaatcccaagaaagctggtgtcacaaaagcagatcaaggagactacagcaagaataaatgccagagaaaagaaaagacgtttcataatggtaacagggtcaaattgacaggaattatccagtaatactcaaactagttgttctaaaacttaatgctgtatagaaaatacctggatctgggaaagagcccaggtatgtgcttattaaattacagcttcaggcacttttaatgccaatcacacaaggaccactttgagaaccagtggtcccagccccctaggtgggctacctaagcctcagtagccttgacacttctatagggcagttgggtaaaaaatgggtcagacttgagggcctccaaggggcagactgataggtgaaggcagagctgctccggccactggacaatggaagggtcagcactgggagccaaggttaactggccctctgaagccccatccacctgccctgtgcagcttgcagctcacagagaaagctgggcattttctaattggtggcacagggagctctggtgcttggatggataggtactgagagacatgggtcaaagctagaggtccagatggggtgttgggatgaagaggccacagacatatgcagaatcttagggtggccagggcactcttaggcccacctggcacttgggaaagtgtgaagggattggggacacactgtgtccctactgcctcaccagggcatagatagggccttagaaaatggcaggaggagcccagcaaggacaccgtgtcctcctcagtcctgtgacctcccttcccgcaaacagagcttggggacttgcaagtaatttggcgagtgcagctatgagggcagcccagaataaaaatggaacagggtcggggggttcctaggagcctggatccgcatcagacctctgtagccgatttctggctgtgtgaccttgggttcgtggtaaacatctggagcctcggtttccccctgtgaatgccaaccttctgggctgctgtgaggatgagggagattgcagagggtgtctggaacagggcctggggtgtggacataggtgtggtgctagtctgcctgagcccgaccaggtaggggctgcagcgaggccagccccacaccctcagggtggggccactcacccgtccgttggtctcgcccttccaccagccctggtctccgccgatgcggctgtagatcctcaccacgtcaccctcccgcagcgaaagctccctcatatctcgggcggcaaagttatacctggccacagctgtgccgatgacgcggggcgtgaacactgttgagggagatgggcagcatcacacagctgcaggaggagcccaaccagtgatccaggaggcccttgggccaagctgggtctctcccctggtgcccagaaccctgctctgtacccagagaggaaggatgtcaagcagaaaggctctggagggacacactggcctccaatcccagggccccttgccctctgggtctggggacacagcacatccaagtccctgcaatgaggatgttcttagggacaagagcaggtgcccaggctttgaccatcatcattccagtggtcccccaaatccaaccagaaacccagtggaaccagcttggcccagatgcagaatcctgatagacaggtgacaatgaccatggctgagggcgaaacacacacagctgctgggaagggactttgactctggcagccgaaagccatgaggtcaaggctgactgaaaacccctcctccctgcacccaagtcccacagctcctcctcgtggccacctgctttctgctaccagaggcaaagctcttgatgaacaaggaggaatgacagtggacggggctgggaaagtggccatcagggtgggcgtgtccacagggggtgggtggtgacaatggcagggccaagcctgacgtgtcctcaggtgctcgcagcagcctctgcccggcctccccagcccctttctcccctccacccagtgccagactgcggacaactgtggccacgtcaggcagggctgtggggccagtgggcagctccgtgctgggtctcccaaggcagctgccacaggcccggtccccccacgccctggggagcagcggtacctgaccagaagggagcggaggggccctgagaagcaaagctgaggccctgaggactgagaaaagaaaagttgtaggaagcacaggaagctgcaaagaggcgagagagaacgtgaggcgggcagcagggcatccacgcacagtcacggtgggcacagctacaggccggggggcatggggtggggcaggccctttggcaggagaggccctacaggggggcaaaggaggcagggggcagcacgggttgtcaagccccacccaggcacaggtgccactcggccacacctgagctaccctggaaccactctatgcacccgtgtactcgagagcaaattgggaccacctcctctcatgccctcgcctggcacatagcaggtgctcactaaggccagctgttcctctcctgtccagctcggcctgtgtgagacccatggccctgcaggaccctgcaggctggaggacgtggggtgactctggagagagtcctgagcgggaagccgcatgctcggggcctgcccctgcccctgattccgtgtggccttccctgttctgagctgtggagtccaacctgcaaacaggctgcctctcacagaggaggcccaggggctgggcacagggagggatctgggaacaggtgggcctgcccttttctctcccacctgtgacagctccatgcgcaggggtctctgcctggacctggcccctccaacccccactggtctctgggtgaagaagccaagacacagagtagcaattctgagcaggtgcagagtccccgcctgtcacatggcccaggagatgccacatgacagcatctgcgatggctgggggaggggcgggggctgtgttccccagggtgggactcctggtctgggtctgtgagggcaggatctgagccctgggaagtgggccagggcagacccctccgaggagtgctggtgtgccggctgggccggggcgttacctggggaccggctggaggccctggaggccgaacgttcccgggacttgtaggggtacttgagtgtggtgtccagctgcttgaagctctccttcagtgagtggcactggtagtactccaccaactcctgcagggcgtacacactcactgacagctgctgccacctccaggaagtcctcccccagtgacctggcctccctctcccacctcttggttcatgtgggggagactagcttcctggactcctcagaactccccacatcccgccagcccatggtgggtggtcagtacctcgaaggtaccagcaactcccccaaatgtttctagaaaaaataatctgcaaaagatgccaagactgaccagcacggacactgactgcaacagcctttataaaggaaagaatggaaacactctgtacccagcacttggggtaagcttctagaaataacaggatctccaagtgacagagagccatgcggccatcagccaggggaagattcattaatggtgaatgtttgtggccttgaaaagtcgcctaaaaatcagctggggcattgccagcattattatttatataatagaaaccagacccaagctgtgtgtagagaggtcctgaggactcactgagatgccaacgctggtttccgcttttgtttttttggaggtggggatgggattatggattttctttttttttttttttttttgagacagagtcttactctgtcacccaggctggagtgcaagggcgcaatctcggctcactgcaatctccgcctcctgggtacaaacaattctcgtgcctcagcctcccaagtaggggggactacaggcgtgtgccaccatgcccggctaatttttgtattttttgtagacatggggttttgccatgttggccaggctggtctcgaactcctgacctcaagtgattcacccacctcggcctcccagagtgctgggattacaggcatgagccactacgctcagcccgagattatggatttctgcttgaccttgtgcttttctgtggccatagcggggaagctaagagcctgggggctctaatcaggagttctcaatatatacaacttttgtaattaagaaaagaaaatgtaggcataactttaaaatcatttcaaggactatgcctctaactgcattctggctgggacagagggtgggggtgagtcggagaagaagctgtttgaagccatacatgtgtaatggggctacccggccaggccccagctggaagccccactgggcgtcagtttctgctctcgcaggaggatgggcatgagaggaatctggggctgctggtggcctgggctgcccctaccccacccctgcactgtttaccagggtcaaccaccttgctcaggctttgggggtcagaagtcccaattcaggaggctgggacatagctctagctgtcctagtgccttaaaaaccaattccctaaatcttggccacactgggaagaatcaatcctcacagaaaacatggccactcgctcagggccgggaggaagcacctgtcccctgtggctggggtgggagccggccggagccagaagtcacctaccaggaggctgtcgaatttcttggcctctgtgatgtggatccagttgtccttctccaccaccttgatgtgcttcacctcatcattgaacctgagcaaacacacggccccggcggtcaccgcgtgagggccacacggccccggcccccttggcagccaggctcattctgtgtttgctgcagcaaagcccctcgtccctggcccccagggccactccctgtcagccctgtcctaccccagcccttcgggccaccagccccagacagctcctgccacctgcctgcctgccctccttgctcgtttggggcccggaacccctggctgctcagctccccgcctctcctggcctctagccctgctgaggcctcctgtcctgggcttctgctcatttgcttttcagtaccaggagcctctcctcctccctgtggagcagccgggcccagccctgacatctcctgacatccttccctgcatgtccacttggccggccaggcctcgggcctgctcctcagaggtgccgagcgcaagcctgtctgggcctcggcaccggctgctgcccctgccagacactaacctccttctgtcctcaaggcccccttatgtcctcacgtctcaattcaaatgtgaccttacagaggagcccccatatccctcccctgaatgccacccacccccttgccagacacagacatcacaagaaaactacagcccaatgtccctaatgactatggatgcagaaatccttagcaagcagctggcagaccaaatctctctcccatacagtcaggcggcgtttaaccagggagacctgtcctgagagatgcaggcaggtgcttccatcactgtacgaacgccacggagtgcatttatataagtctggatggcattgcctactgcacaccccacacctaggctggacagcagagcctactgcacaccccacatgtaggctggacggcagagcctaccacacaccctatacctaagctgaatgatggagcctactgcacgccccacaactaggctggacggcagagcctactgcacaccccacacctaggctggacggcagagcctactgcacaccccacacctaggctggacggcagagcctactgcacaccccacagctaggctggacggcagagcctactgcacaccccacacctaggctggacagcagagcctactgcacaccccacacctaggctggacggcagagcctactgcacaccccacacctaggctggacggcaaagcctattgctcccgggctacagacctactgaatactgtaggcagttgtaacatgaggtcagcctagaaaaggtatggtaaaaacacagtagaaaagataaaaaacaggacagctgtatggggtgcttatcatgactggagcttgcaggactggaagttgctctgggtgagctggagagtggtgagtaaatgtgaaggcctaggacattgctgtgcaccactgtagactttatcaacgctggacactgaggctacactacatttatttttaaaacattctttcttcaatcgtaaattaactttataaacttcttaatttttgttaactttttgaagcttgggtaataatacttagcttaaaacacaaacatattacacagctgtacaaagatattttattctttgtatccttattctataagctttcctgttttttttctttgttgttgttgtttttactcctaagacaacaatgccttcttctagaatgtctcctgaaggacgtgcctgaggctgttttacaattaagtatttttttgctgagtagaaggagtatgctctaaaataaaaagcactgtatagtgaatccataaaccagtaacacattcatgtattacgatgatcacatactatgtatgtgcagaattgtttgtcctatgcttctatatgactggcagcactgtaggtttgtttacaccagcataaccacactcacatgagtaatgggctgcgctatgatgtcaccaggccatgggaacatttcagctccattataatcttacgggaccaccaccacatatggggtccctcacagactggaatgtcattatgtggccgatgactgtatttatctacataaaccagacacatagcaaggactccacaccacaacccagtgggacattccaggaatgcaaggttggtttaacatctggaaatcagctaatgtaataaacagtcattaaacaaatggtggcctggctgcctggtcctctgtgaggccttcatacagcacccatcttgtttctccctggatttaatgtgcaccatgagtgtgtgcgccctacccccagctcctggtcggcaaggcccatcttagcctcctgcaggccaggcacacagaaggctttctgagaatttctttcaggtgggcaatgtcccaccagctcagtgcttggtgggctccagcccatcagggtcggtctcctggagagttaactgcagccccacaaggaggcggctcccagggagagggcatagggcaggaggatgcccagactgtgccaaagccgcaaggcagcagtagtcacaggagacaccctcctaggcccctggctgcctcagagcagcacgacaggtccactctctcaacctgtggggctgctgggaaatccctgagctcacacaggatctcacccacccacttgtacctgagcttatctggttcccatgacccagaaatgtccaacccagcccacagggcagccaggagtgatgtaagcatggaccatctgtgcatgccaggggttcaggccctgcccagcacacctgtagagaccccctgacccctcagcaccgctttcatctcaataatgtcctcacttggcaacagatgacatgtccaccccaaccccacgagctcaggacgtggagaggatggtgctctccacttcagaacggcattgggggatgggtctcctcgagcccagagccgccacttacttgatgcttattgcaaagcgctcagcctcggcaggccgctccctgatcaggtaggtcccgctggcgtgggacttgagcaggttgtccgtctgctgcctctccatgttacctgcaaacctacaggagggggccgggaggaaacgagagccgcagtgaggacagtgtctgaggggtgcccagccctccgtgcgtggcaggccacatgaagtactctgcagtcctcatctgagagctcatctcctaatgaacccaagagaacaggctgggtccctatgagcggggcaccactgtggatggggtctggcatctgacccttcctacagtgggatacagtgaggctcaggacagatcttgagaggggttaaatagaggggtgactgtggccaccagccagtcccacatgctgtcttctgctctacagaccccaagggcctgccagaggagttcagcgtattcagtagatccaatttctttcctaaaatatattttcactatttcaaaagcagtaaaggcataactgcttatgtggatttttttggtaacacattggagattgccaacatccatgtcagttgaattttgaacagattttgaaacgaagctcttcctgccacctgtactgcaatgaagcccaccctgagagggcaaggcaagctctctcccaaaatctgctgccacactgtcaggacagttgggacttctgtgatttcaaacagcctcactgttcccaccaagcaactgtattgtcagtaagtggattacacctgtgacctcaaatataccacttttatatagtgcagataaaattcaaaaagggtttaattccctgaaatatctgagccagttgagctgttttagagagggttaacagctgcctacaggagaaggactcccccaggctcctggagagttataggccaggagggagaaggcatttgggagccactgggctcagtgccctggagatggcaacaggcagcctggggcctccaccctgctgggccgctcacaggcaccacccagacccggcgggcatgcccccataacaaagaggccaccagatgcccatgtctgcagcccacgatccactcaccaggggtatgcagtgtagtcgatctcccgggatggcggccggctgatgggcggctggtggcagagcacaagagtgttaacggccccccagggccactcacagagcagggctcagagggggtcattgtcagtgactgccctgtccccacattggctgccctggaggggactgtctgtggacttagccccagcgcccctggcctgggaggtgcccaagggtcgtggccaggacaacctcatctctgagtagatgccccgtgggtctgatggaacagatgtcggcatagccaccagctaacactgacttgatcccctgggacagcaaggaccgaaggtgcgggaagttttcagccagtggatgtgagacacccacagccaagctccctgctccagaggtctggaaaccccggggtgggggtctggtggtggccacactcaggcaggtgctgccgctccagtgagcaggtagggctccctccctggctacagccccccaccctggcctcactgggccacaggctgggcacagcctcagagactacctcttccctcgcaccctattcaccatgcagatggggaaactgaggcctggggaagggaaggaacctgccccaggccacctagtgagtttgtgacccttgtcctcccctgccgcctggtccccttggtcacgcaaagtgccctaagtgctgagcacctgccctttcagcagaggtagcacacaggcggacgggactggggctggggtcggggagcaccggggctgccgcagtggggttgggaacccacccctgcaccttcagaggttccacgctctcactctgagctgtcctttcggggtggaggtggggtaactcatttactcaaggctgcctgctgcctttcatcacagagccgagaattcgctccatatccctcagatgaaagaaataccatattgcctctgttttaaatagcataaagtctagctttgaatccttatgtttgaggggagcctttttttctctctaaggctgcgcaatagtccaagagatcttatagagtccccgaaatctggtgaaaggcagctggctggtcttcaccccattacagctgctgcagaaatgcctgttttggtgtttctaaaaccacaacgaaacgacacccgatcggctgagccctttaaacagaggagagcgtgctgccccacagccccccacccatcttctctctgggctccagctccaggaagcagctcacagcagcctaaatttagcaaggatgtcctgaacaagccaaaaatgtccacgtgaggaggcagctcccagaaccctcagcacccaggccaccgtgctccagaagcttctgtgggaaaggactcacccttccatccacagggcagggcttcacagatgagctggggaaataccctgacttcctggtttgtaccagacgaccctggcagaggaaagagatggttaggacaagggggccgagcctggcctatgggagtgtggggccatttagacggactcagcgtatgccaatcccgctcctggagggtgggagagccaatgtcttctttcccaacctcagctgacccggcagccagttagggcagggaggtgcagggcctcccaccctagacatgagagcactaaggcctggcacagcaccaaagcacctccacaaggcccccccaagaagctggcagccctggtcatacccggggagggacagagcaggactgatactctgcacagctcagatggccttttgcaccctctgaacctcctgttacatgaatgtagggtctggtacaagaaatccatcaccgagtatggactgataatgaccatgacaaaatgaccacagcatcattgtaacctgaacattaacaaacattcggctctaatgtcagctcccgcgggaagctaccttgctgggctaagtgccctcgaggccccgtggcgctctgctgacctgtgggtcttggggctcccttgagcactggggcttggtagaggggccgaggactgggggtctgagtccttggctcagacgcccgggtgccagcatgctcaacgacatggggtctcagcgtgtcaagagaagggcaaatgtgcccagaaccctttacagcccagccatctgctgaaggtggggatgaacgcccacaaaggtccccgggatgaacgcccacaaaggtccccactctgtgggccttggaaacagagcagcacattcctggctcagaaccataaacgacatcacgatgacaacatctgtgcccacctggggaaggagcgaacctgcccgctcaccccacgatcatgcgaaggttgctggcctgaactgaggtaggggtggggaggagggtgggcatggcatggccagggcagaagcctgagggcctatgagacacaacagaggcaggaaggacagaggacaatggagaaaggccttgggtgccagggcaggagggcctctcctgggaagggacgctgcatcgcctaccatgtcaaagcaaacacccggggagcccaagctaaggttcccaagaacacatgccatggcgcagaacggggcactgaggcaggagaggccttgctaggccccctgtgcctcctcctccctggtggtctctcacctctctgcctctgcctggggatgtgcaggactttatgcttctgccccagggagcagggaggagctggagccggggaccctcgaccctcccgggccccaggacccacctcccaccacggagactcagggtcgcccctcagcagctcaagcacgtcgcccgtctggaaggtcagcacaggcttcccgggaggggctgggttgccatggtaattctgcatggccaccatcttgggacctgcaaaggataggacagctcactcagtgactcagcagctcactcggtgactgacttggccccggcccgcagcccaccccatcaccaagctcggcctcccccagcacacacagccttgcgcctgcatctcccttccctaaatccttcccataagcctcatgtctttttgataaatatcataattatttatgcaatagacagattcaggggtcatcatggaacagcaacttattttcagatggcactttgtgttttcttccaaacacccttcagatctgtggcccacaggcagctgtgcggggcagaagacgggggatccctcgtgtcagagacgggcgacgggtcagcaggcccagcagcttgcccaaggccacagagctcacagaggtgctctgggcctgaaatgggggtcctggctgtgcctccagggaatgtggaggctgctcttagacaagccttgctctgacccagccctgcctgtagctctcaaggagcccatggctctcccagcccagctcccgcctggcccagcagcagcagcagcatttttcatcttttgtcctctgccgatgagggtgaggctgtactgagcactgcctggactgcactcaagtttgcagagaacacgatgctttttacgctgtgtctagaagcacgtttccattaagcaacccgcagcaaggcaggaaggggatggagaacgtggtgggagaacagcagcgccttttgatctcaggtctctggctgcagttcggtggccctccctggctagaaggcccttgctcctctgcaggctgggtcctgtccctacagcctggtgctgccttatcagaaacagagccacctcccaaggaggtgccatagaggccagagaggcaagagggagggggcccagatggcagcatccaggagcctggagcgtctggtggctgggcagacctggccatcaccacacctaggccctggctcagctcccaggtgatggctgacatgggtgatagcagagggcccaggtccagaagactcacctggtcccgctccggaggcgtcctgtgaggacaaggacagaacacagagatgagggaaggctgctctttgactgtggcccatgcatcaacgcaccccgccctccctgtccccactagttcctagatagaggggtcaaggcaggagcaggggaggagagggacactgttccctatgggacgcccccaccctggcaatatatttcacctctgtgcacctccactcctggaaggtctgtgcccttctctctcccactccttaccacgggcccccacctcctccaggaagcctgccctgaccacctgctctgagcctgggctttgtggtgtccatctgggacacacagtgccaaatacgactaagtttccatcctccatggaggctggttcatgtggaccccatagctcgaggggcacacgaagcccctggaagtgactccatccccacatcagctaaacagagggctctgagccaactgggggactcgggggcaggagggctggtgcaggtcccagagctgtacccatagccgcgagcagccactgggcaagggaatgaggcgggcagctgggatcggaagacaccgctggggcccctaggaggactctaatgacacccaccaaggaaagcagaggcatcttgtgaccaaaagtggctcatccaagccggtgtggccccatgagtggtgaaaggcagacaattgggtctttctggctctgcgcacacagggatgtggcgggggtggggcagagggaggggaaacactctggggacttaccagatctgcaggagaagctggaaaggaagcaggtcaggtgttagaggggaggccaccgacgccaaggccccgtgcagctctcactcacaccgccccgagcctctgggccgagcttaagatggtaagtgagccaagctacaaagtggtctgttttggacatggatcatggacacacaggtccgagctcatggctgtgaaagcctctcagttacttctggcagcaaattctgagctctggctttagggggcccatgggagaacttggactgggtaatagacctgagctggcaaaaaggttatcccgcctgggccacctcttttgaatggcggcagctgcctggatcatggggtggtacctggcactcaaaggggagatttccacaatcgcttagtgatgcctgctggggcacgtgatgaggaagcattggtatgcatgctacctgccacaaccgcttagtgatgcctgctggggcaagtgatgaggaggcattggtacgcatgctacctgcttgccatcctcagctcagacacccaggtgccaacacgctcaaggacacaagaccttaggtgccaggagagccaatgttcccaaggccctttagggcccagccatctgccaaggtggctgccacctaccaccagaggaggcaaggaggaaaaggagcccaacagctcacacacatcgctgacgtgacctccacaccacccagcactcacagtgcagacagctctgggcagacagaggtatccacagacaccacagaacaggttccagctcagtgggcaggggtcaggggtggggggcagctggacggcagcaatgactgtgcctgatgggggcttcccacaggaaaggctctcaggagaggccagcatctctccgggacatctcggcccccatgggcagcaaacagctaaaccagcctcggcagagcccaggggtgaaggctacaatggtcaaaggagcactttccagagccaaaccccagagcaaaggtagaagcctggatcagagggaaggcagcttggacactgttaagggaaaaatggctacaagtggcaaggacggcgtcccccagcagagggatgaggaggggggcaaggacacaggcccctggggagaatggagctggtgccagccagggcgctgccaggacatgggagaatgcagacagcaatgctggcttccaaaagacctgcagttccaactacacatactaagaaaaattcaaaaccatacagagatggggtgggcgggtgtgcgcgtctgcagaaagcaggacagtgcttggggcctcgtggcagctggctttgcctggggataggaggagtagtttttctctcctcctttacacttctctacattttccaaattttctacggaaaatcagtaattaataatccggcgggggcggggcgggggaggaacagaaagattacaaaaaaagaaaacttggaaggaaatataccgaaacattgcctttcatcatttctaggtaagttcacgggtgatactttctttaaaatttcatttctttttttttcctccaaatttttgataagtaaacattacctttagaatcagagaaagcaaaaaaagattctaagtagctgcagccatcgtctggggacatgcgaccacgagagggcagtattgatgggcacagctgaaaagctgcgttcaggccacaggctgcctgcggaatcctccagcactaactccaggggctgcgggatcctgtgcacagctagggggctgcattgggcctgtgatggggacaagggggtctgggctgaccttctggccctctccccaggttagggtactgggctggcactcacagtaaatggtgaattaaccattgatctaaaatcacagctcaaaatgtattctgggcaatggcgtctctgggtgacaatctctgggtgacaagctggcctgacttgtttttctgccttaagacaccttcaggaggctcaaggagacaagacccagagactcggcctggggccaccgggggctctttgttgaatagaagctctgctaataagtgtagacaaattgctgaaagtttcaagcctcagtttctggggctgatgatggaggtgacatcctgatgtctgaaacctctcaggagagaactgtctcaggctttgcactgctgtccagctgccctgagcagggcacaaccccaaaggtatgcccccgacccaaggtgcttcagaggagcctccagggcgcatccctgcctctgcccactgccagcctggctcaatcctctcccctccctgagcctcaagcttccctaaatgggcatgaacagaagggaaccactgtaagtgccatgtgtgtatgcgtgcatgtgtgtgtgtgtctgaaccatttactaacatggctatagctactgatggccaggcctcacccgccgggagaacccagggtgaccggtgtttctgtgatgagaaacctccatgcacctgttgagaatgttctgtgccgtgtttgggggtggagattctagaagcttcctcctggagtggggcaggggatgcaggagatggggaggggtcctcaagtacccattaggagagagggcttggaatggaattcatcccggctgtgtctcctgttaagtgtgtgacgtgcggcaggcgtctggtgtctgctctggggcacgtgagcactggtgccctcatctggtcgctgccccgtgggagatggtgcccgaggcccgtacccaggtggtagggggcagaagtgagcaggcgtggccagggactggggtgggggggtgaggggggtactcactgaacttgcagggaggtatcacttccaggcactccttgtgtgccccgacgccacacttggtacacatgtatccctggtagaaggtgcccctgcacaggggagggcaggaggtgaggtcgaggctggggtcggctcctcatgcctctctgccaaggtcaaggcccttgtccccacccaggctcacctggctggctgtctcccagcacacacatccctcatagccctgagtatccaggaccctcccttaccaggcagcctgacacctgctttcccctacctccaccagcctgcctccctgccccacacagcatcccgggcacccaggaacaatcacctcccggctagatctgaaactctaagggcttggctgggccgttttttttttttttttttttggagacagggtctcactctgtcacccaggctggagtgcagtggcgacatcacagctcactggaggctcaatctccaggacttattcaattctcccacatcagcctcccgagtagctggggccacaggagcaggccaacacgcctggctgactttggtattttttgtacagacagagttttgccacgttgccaggctggtcctgaactactgggctcaagcgattcgcctgcctcagcctcccaaagtgctgagacttgagccaccatgcctggcacgggcctgactcttgtggggtatactcccttaacccctcagggcctcccacagggaacatgggacagatagaacactaagctctctcaggggcctgggctgggcgtggagcgaggtgagggctgtagcagggggtttcccacacctgaggaacattttgcaggctttgcagttggtggtcttgtcaaacgtgtacatctggaaactgtggtggttggcattggctttgtctggcttgatgtttgacctggcaggagggaaagagagcagatgctacacccactggattccccgagccccaccatgtggccatcctgggaaccagctgggctccggacccaggctgtgcagaatccgagagggcctggactccaagcctggctctgcccgcaacatggggcagactcagggcccagactccctgctcgtagaaggcaggtcagagaagaagctttaacactgctgcactggcctgagagaaccttccaggtggggacggtggtctaaggtcctgactgggcttggatgtgggcaggtgtgggtatttgttaaaactcagaaaacatatacttaagatttgtttgcctcattggatataagcttgaaatttcagaagctaaacaaatattgggccccctgaggtactcaggggggctgcactggtgtgcaattcactttgacacagacccgctgttggatggctggggtggggtggggtgacgcggatggcggcagcgtggtgagaagacggctattcaccatcacgtcgcttcagcttccatgaacgcttgaacttttgcacaataggatgttggggagaaaattacaggccatggaaagcgagtggccgaagagaagatgccccaggcctcccccacagagcctgggtgcaaaccagctggctgcatctattctcacgagccaggccctggccctgctgtgtccaatggttccctttcgatcctcccaaaaaggccagaacacaggccttcccctctccatttcaccagaagaaacggtcagagaggcgagtgcacctgcctgcaggccccagctcacctgcccgcagagctcaagcacagacaaccctgctggccctccagggtccgtgttccgggaacccgttcatcatctttctctgtttcacatatctaggatatgagtcctcttggatctcatggaaaaatagttctgtggcttcaaaaacaggtgacaagccgccagcccgtaagaccctgaagactggggtcaccaggaatcctctggcatcatggccactcccagccggtcactgctctgtgggccgggcgtgccaggctcagcctcaagggtgggatggctcattccagcaggacagcggagcctgcctgggacaggctgtggcagagggagagccctctcactctggactgattgttaaagaggatgtcactgcttgaggctggcgtcccaggggtgatggaggttgtctgtgtccctgacgttccaactttgcctcccaccgcccctggtctgagaggaaccacagacacaatccacctgggcttccaccccccatacaactcatctgccagggacctgggggctgccgccctggaactcacatggccatctcaaactgctccatccacttcctcttcatatcttctgttttgcagaaaaactggaagccctgctttccttgaaggtgaattaggtagaagccgtaggaccactgcaggggggagaggggccatgcttgcaatagacacggcttcagacatcctggcacatgtccacgtgtactctcgcctgtgcagcatgtgcacgtgtgtatatgcatatgtgcacaggtgcctgtgcctgtgtgaacacatgttctcacgtgtgtacctgctctcttgcccatgctgtacgtgcacacgtgcctctgtatgcatgcatgtatagctgtgtgcccataccctcacgtgagaatacatatgcgcttgtgccttcacctctgcatgcatactagtgtgctcctgcgtgcatgggtgtgcatctgtgcctgcacgcgtgtctatgcgtgtgcacctgtgcatgagtgtgcccagtgctcctgtgagcatgtgcacacacacacttgtatctgtccctgcaggtacacacatgtactaacacgtatgatgcacatgcacccatgctgtgtgagctctcctgtgggtgctctcctgtgtgtgctctcctgtgggtgctctcctgtgggtgcacacacacatgcctgggcaggtctgcactcctgcctgcgcccatgtgcgaggatgctccaccgagtgcatatgtagatgcatgttaagcgggggcaggatcccaggaaggatgagcgcagggccccacccagggcccctccacgaggcctgaccacccactttcacttcctaaatgtgatgctaaaaaaacctcacttctctgaagtagaacagtaacaacaaaaaggcagggaacagccatgggcctggggcaccccccgtgaagccatccccgactgagcaacccacaactgcccccttccctgcctccccttcggccaccccacaggcctcgccatctctccgagctctcggacaaagggctttcaaagtggtccagaaaaaagagtttggcaaataggagcctactgggttagaaaagatggcgggaaagaggaacgaagggagggatggagaggggaagcgtggagcggggatgggaggaggaaagaaacaaggaaagagagaggaaaaggggagaaagagggagggaggagggagagaacacagaaaaacaaaaaggatgatggagagctgaagagagaccaagaaaccccagcctctgaccccgagctccagggactgaggatcacggagttttcctttcacactgtcttagcgggcaagcctttcatcatgaatacaaatcatttcatcatcgggaaagggagtggaggacgaaggaccaagaaaaccctgagcccagcccctcaggcccctgggtcccctggctccgggcagaagtgccagcaccaggctgggatgattgaggcaggtgggaggacctgggcgctaggtgcttaccattttcccgtgagactaggaagcatggagaggagaggaaggggaagacggtcagtgagaggctaagcccggccctgtggtgggtgccgcagtgtggaggcgccaggagccctggcaggtggaacaccccccagtgcccaggctgggggtggggtgatcagtggggaaaggaatttcttcccagagtgttgggtgctggtggcaggactgcctcatgggccccagttacttgttttgggcatgagggcagggagggtcaccctcaacagctcatccagtctgcacttgctgggtctggacgagggctacactgccagccctggaggccagggactggactttcagaacaagggctcctgacccccgccccccaccccaccagggctgcacacggtagctgctcaagtgccatgggcagaagcctcagctgaagcaggactgaaccagacagccagccagcaatagccctatagccatggtcctgccccacagcagcttcggccccgtccctgtagccctggccccacccgctggcagccacaggcccacctctgcagtcctggccccgccccagcagccacaggccccacccctgcagccctggccccaccccagcagccacaggccccagccagctacatgtagagtctcggacaagccacagccagacctacccacagccctcctccaagcaccgcagggtgggacgggagaggaaagcctgcttgctacaagggacaacatgggctagagtcaggctggccagatggaaagccaaggttgaaagtcccaccctcactagaggccttggggtggcctctcccctctgcctcagtcgcctcactggggagtgggattctggtcttgcccacctttctggggggcgctgggcccggcgaggagcaggcctgctatgagcagtggtcacgacggcgaggcagtgactcagagaggagccttcctgcagagcggagacgcccaccccaacccacccggccagcatcagcggctgacttcgagtccccttcccctggggtctggaacccagtgcctctctccaggccacccccacgttcctgggtagcaggggggacccggaaggccccaccttcttgacgtccttgttgttcatggggtcgtcggtcatcttgtggaacagcagctcgatgatctccttgagctcgtagctgtagcccttccgcttgcagacgatgaccaccttgtcaaacaggaacaagtacctgggccaggcagcgcagcgggggatcagcaccccagcactgtgtgctctgctccgaggaggcggcaggagctgagcctgaggctctggcacgcggctccctctccgggcgagccctgccctcacctggctcaccaggctaatgctgagcctcggtcaggtctcggctgttcccacactgcttctccaggaagccttccttggctccctacccccgtgactgaggctgtgccaggagcccttcaaggggctcctgcatcccccacgctggcctcccatgcagcactgacccccgacggctactcccagttgatcccgcgctggactgggagcctcaagagggtgggacccagatctgctgtgacccctgccccagcacacagtaggtgcacaaggagggccctggacaagcctgggccaccgtgcgcctggacactctccggcagtcatttggcaaagagcccatccgaccactctgggcctgtcttgggttcctggaggctgagcattggcagtgaggggcctggccctcatctttggctgccccagcccagcctggtgcccgccacaggcacaaaagccccactgctgtggcgcccgctcgctgacgagaaggaaggaagcaattaaaactgaacaacacaaagccaccgccaggcagctctttccacaggaaggcctggcttccagagccacttaggagtggctccctgggagggagagccagaccctggcgggacgccacccagcccacaacacgcgccctgctcacctgtcctgcttggtgtggttgactatggaccggactttcagttccccgtcaatctttggtcttccaaattcctccagtttcacttgctgggaagaaggagaggggccgtcagccggggctggagcagccccagttctcctgaccgcacgggcagggcagactgtcgtgcacccaagggaactccccacaggcagcagaggcgggacgaagggaaacagcccctgtggctcccagctggtgctcaggatggacgagggagggtgcagaagaccgggaagggactgggcctggcagcttctctccctttcctggccagccctgccaaggggctcccttcagctctggggacaaagggcgattgacggtgccggttgtgttcacagaggccgccgctgtgtggagccccaagcgggacccggtcggaaaagccagaagcccaagccccacgttcaggagagaacaaacagcgcctatctgctgcagggcgggtggggccggggtcctgccaagggtgaggcttcgactcagacccctgtgtggttcgctgaggttcattttcgttgtctgtctggttttgtctctgtgactcttctgattcagagagagcttctcttgacatgttccctgcgtggctttcaaagtgtccacacagacaggaaaaggtggaggaaaatgcttcaagacacgaacagggccctgcctgggaggtgctcgaggcacaggctcagtgtctccttccaaggtctcagccccagaggctgcaaggacagctttggtgtcacatagtcccagtcaacttgctccaggcctctgatctcagctctcaccaccttccctgtggcaatgggattcagagccaggactgggtacagggcctggctcatggggatgctcgacgcctgctggccatgctgttttattcttgttgttgtcgtttttgagatagtctcactacgtcacccaggctggagtgcagtggcgcaatcgtggctcactgcaacctctgcctcccgggttcaagagattctcctgcctcagcctcccaagtagctgcgattataggcacccgccagcacgcctggctaatttttgtatttttagtagagacagggttttaccacatttgccaggttggtctcgaactcctgacctcaagtgatccttccacctcagcctcccagagtgctgggattacaggcatgaccaccgcgcccagcctgttcttgctgtttaatgaacaagtattacttctatgtaaaaacttaaaaaacaaaacaaaacgaacttttctcctcacgtcctgctcactgtacgcatttgtgaccgcctcgcgcaggagctcacggcagcacggacccgccaggtgctgatggtgcagggtgcggccgtccttggcctcctctgcacccacacattttaatttctttctaaaatgaaagatgaagggggcagtatcataatgcccttcagaagcttattttttttttctttcatcgccgacgtatcgcaggtgcttttccgtgccccacgttcgcggagggcattctctttgtgctgctggcaccgggtgggtgtggcctggccatcggggaccttcccctgccagcttcatgtcagtgaaatcaccagggtgaaaatgtttgtgattcaccaccaggggtaattttgccacccaaaggaccctctggtaatgtccagaggcatatctggttggcattacttgagggggtgggggtgctactggtgtctggtgggtggcaggcaggtacactgctccacatcctgtaacgcacaggggcaggtcccacaaccaagaatgatccagccccagacgtcagcagtgctgaggtggagaagcccaggttagaaccagcagatcctcgggaagtcggctccggtcagcacagaccagggagtttgcttcctggggtggcgcatcccctctccccaggcaggacgaggtgactgactcggtagcccaagcctggcctctgcagggccagactctggggagccccaggaggtggcagccctgcctgatggggtccgaggagcagaggcgactgccggccccaccgagcctgggcccaaaccctgtccattgcccctggaggggagagtcaaggtgagggtgggccaggggtccacgaaccagggggcgtctcctgcccctgggagacacagttctcctcttggacttgaaggggtcttctgtctaggcttgggggagaaggggggctgggcaatgaatacagtccctcccctgtcccctcccctccccgtccccctccccccgagcacaggcagtcttcagtgcacagggcacttgggttggctgtcgtgggcaaggaagcgtggatgctgggggtctgagatcaaactcagaagttgccgggcaccagcctctcaacaggcagccatggtgtggctgcccatggagctcactcaatactggggctgtgaacgtgactttataggtacgtcctcatcgaccttccctagcctgaagagtcagtctcactcaccaaattttctatagaactctgaaattcgctgattttcctcaaggtctccttgtcccgtttaacttcattgatgtacatcgccaagtccttgaaaacaagaggcagaggtgagcgggctgtgctgggtggggtgtgtgtgactgtgtgtgtaagcaggctgtactgggtggggtgtgtgtgcatgtgagcgggctgtgctgggtggggggtgtgtgactgtgtgtgaatgagctgtgctgggtggggtgtgtgtgtgtgagcatgtgtgagcggactgtgctgtggtgtgtgtgtgtgagacagcatgtgtgtgtgagcgggctgtactgtgtggggtgtgtgtgagcgggttgtgctgggtggggtgtgtgtgactgtgtgtgtgtaagcgggctgtactgggtggggtgtgtgtgactgtgtgtgtgagctggttgtgctggttggggtgtgtgtgactgtgtgtataagcgggctgtactgggtggggtgtgtggtatgtgagcgagctgtgctgggtggggtatgtgtgtgtgattgtgtgtatgtgtgagtgagctgtgctgggtggggtgcatgtgtgtgtgtgtgtgagcgggctgtgctgtggtgtgtatgtgtatgagtgattgtgtgagaacatgtgtgtctgagtgggctgtactgggtagggtgtgtgtgattgtgtgtgtgattgtgtgagcaggttatgctgagtggggtgcgtgtgattgggtgtgtgttattgtgtgtgtgtatgtgagcaggttgtgccgggtggggtgtgtctgactgtgtggttgtgtgtgtgagcaagctgtgctgtgcagggtgtgtgtgtgtgagcgtgtgtgtgcatgcacgcacatacatgcaggagctcagcccccaagggacccccccccccaccccccacccagcatccaggcaccgggcgtttctggaccttcttcctccatcctgccggggaggccgccctcgagacaggagggctgaaaaacatcacctctgcatgacagatgaggaaactgaggcaggaaagggaacacactgaccgagagccacacctcgtcagtgatgatgccaagagccccaaactcctggctggtgccacttctttctaccccatcacgtggtccctcttaaacatcctaatagagggaagcagccctgtgtgtgggagccacatcaggccacataagagccacctagacttgggctgacctatgtccctgttcttgggaagcttccccctccccagcctctctaagccacagcctccccttggagcctggacagaatgaggggtcaggaagtccctctctccacgggtctggccacccccactccggcgcctgcctgccgtgctgcaatcctcgtgctggccaccagagagcagtgcccacttcagtccagaaaacgcagtgtccagacctggcccacagcggaacccaagggagccggccacgtgggcggtcctggccctgccccccgagagcagcgggtggaattccccaaaatgcaagtgaccagccagggccagagccagagccagagccaggtcttcagcaggttcccatccctcccgcccttcctcgttcctagaagacctcaccattggctccccacccaccccgcaggagggaacttcctggggaggctgcagcacgctgtctgaaaggggtgttccgttttcttgtcgttgtccacttgcctttaaaataaggaataaattcccagagacaaggaccccagtagcaagtctggagctcaggaccacccccctcccaaaggcagaaacattacaactgtgaccaccgcggcccctgcgtgcacctggcccaatgcctggcatgaaataggaacagatggaagttgcccgaatgaatgagcaggtgagggaaatgtctgtactttgatacagaggcaggactgcagtcagctcatggagcttggacctaaaaccgcaattcccttggagacaaacctcaggcccacagcggcacgggggctgattctcaaagacgctgccgtacaaggagtgagccctcagtccctaggggaaatcaagcccaggtacagcgacgactcccatagtggctgcatgaatgacttcctatataaattgggaatggatcaaaagacttctaaaatccccccagccctgaagtttcatgatgaggttcggtggctctcagaaaggcagacgcacacccgcaagtcaccgagtactttgtgcagcaccgtgagctacactcctgggaaaccatcccgtcgaggggctcagagccactcgccagccagacaccgagtgctgagagtatgaaacgcaagaccacactcagggcccgggtgcacggcccactgcacctgctgtcactgtctcagagcccccgaggacgcatccacgctggctcacacaccgtggctcacagcagacaggccagagcaggtgttggagaggggcggcttgggggctgcagagctgacaccgagaaagttctgtcagcccgtcatggcaggaggctttcctggagcattcctcagggtgctcgctgcccagtgcagccgagcgggaatctgaaggtctctgggaccacctcccgtgcccacacacgagtgcccacaggatttggagtaaatttctccccgagcacaagccctgctcagagaacctcttagcaccggcggccaagcactggccccactcccgtcccagcccaacagcagctatagacagagacagattacagcccctcccccacccagagggagctccttaaatgaggtacctgggaaaggaaaagggggcccaaagcccaggggggctgcccagagggcaggggccaggtgtcagagggcaggactgcagccctgaggggggctggcagaggtgtcctgtgctcccgacgagggagatgtggggggggtcgtcatccctccacccagatgcagctggaggggacctaccacatgccaggtgctgtgcctggcctggggacacaggtgactatggctgacacatgcctggctgggaaggagatggcacgaacaagtgtgtccaggaggaagagtgccacccacgaggaagccagttccctgaggacagaacccagtggggggcgatcctccctggaaaacgttctgtccacagtgaaggcaggatgagcaggacgtggccaggtgacgaggaggagggtgcacctgagccaacacccggagccggggaagtgcagggcacgtgcaggagcctgggagggatcaaacctgcctggaactgtgctgaacacagctgcgacatcaggggcaagtatcctgcagaaggccgggagtgccagagtgaggagcccatgcctgcttcatgggcagagggagccacggaaggtttctgagcaagggagtggcatgagctgagctcacccggacaaggggagagagggaggcatggctggctgggggccctcgaaacagccaggagcgaaggagctccccaggcaggtagctgagagatggcaccggaggtggcattttagaagcagaagcctcagtgctgggagtgagaagcactgggccagaaagcccagaatggaggccaatgcctgggggaaaagcagggggaggggaggctcaagggaggtcttgttggacaggtgaggttaggactcgggacacctgagggggcacctgacctgcagtgccctccacccgtcacctctacctcctgtgggtctcacccactgccctgccctgccctgccccaactcctgctgtcccaggaaactgtccacagtcaaaactgaggctcgttaatgagcccaattccagtccaagaacacgggctaagccagacggtggcttctcccctgcctcagtttacccacacacctgcatggcttccagtgcttctttgagctgctgcctctcaggccgttccgcagaatggctcagaagctcctggaagggtgagaagagtgtcatgtgttaccactcgggggttctggcctctgccctggcccctacctggggcaggaggtgtgcacagaaccaagtcctcagaagaaagccacccccacccgccagccaggctgggtttggctgcccgacaccaaaggacagagagtgactcctccacaggggataccccacttcttggcaggggcgctcccaaaccttgtggataagggaagggagtgaccgtgagaagggccatgaaggcagcaaaaagcaaggcgctgtgccagcattccacgggaaaagggcctcgcaaggtgccgggcagaaaccaccgccttccctcccaggtctggctttcctgaagcccttccatgtccatttctgccatggccaccaggaagctcagagaccaaccacagtagctttcttattcctggtgtgaggacgcttttctgtctctttcagttttctgacctctttagtgattggactcatcattttcctctgtgtatttactgtgataatcggccatcacatgcattgagcggtgattatgagctaagcatgaactgacttgtctatattcaacttaatctgtctgtgggctgcaacctataccccctggaagctgccagccctcatctgactccagcagtgatgaccccgcaggcacccggggcccagagcctcaccttcaagagcaggtggtatttgagcaccctctgcatggggaccaccagcaggtcttgcagcttaaattttccatcctggaccttcagtgtgcactcctgggagggcgacagggcgatgggagagccctccccgaggaaagcctgaacccacccacctgtacccccgcccacagagaggggagacctaagcccagaactcaggcccagacgtttggcccttctctagccaggctcccggaaccagtccatgcaccaggtgtgtgcagaggggggggcttcacaacacatggctcccaccctgccgtgtctgcactggccacactgggacgcagtgagacacgtgcgatgctacggaaaccctctcggggcgcctgctgggcctgtctggatgtggccttgactcttccgccaggccaggtcctttggagaaggtcctttggagaaggggcagcaggccatcccccattcaccaacccctctctggtctggcctctgggagaagcaaggtggggcaccaacttgcactgagctgtggggccactcccaggaaccagggcattcccccattcattgactggacttggggggcatcgtgcatctctactggggggccacgctgcctccaccactgctagagccagggggctcttcaccaggctccacgcagaaaccagggtgtactaaccagatggagcctggaaactccagctgggaacaggaggggctgggaggggctcacgtgagaaacactagatgttgacagagacttgccctgggcctggggtgaggatggatgaggggtgggtggccccacagttcccagcaaatgttacccgggactccctggggtcagcggaggccaggatcaggggtcagtcagagcccccagttgatagagactcgccctgggcctggggtgaggatggatgaggggtgggtggtcccacagttcccagcaaatggcacctggggctccctggagtcagcagaggccaggatcaggggtcagccagagcccccagctgagtcagattcagtcccaaggacgtttctccatggggagtctcactgtgtcctggcctgggatggtgacctccacccaacccactccccaacccaacacaatgcaaaaaagaaaaatctacaaaaaaccattacgtcatcacccccatcaccaccttcccaacaaatgggcaagagagaggctggtacctaacgagctctggcctgcaagctgcaaccttggagccagggccagggccaacgcctggcaggacttacctcgactttctgcctgaagtcctcccggctggccaggagctggttcagtgtgttctgggcgtgctccatgtggctgcagtactccccgtagatcagaagcctggacggtgcacacacacgcacacacgcacacagatttaatgagcagctcggggctgcagtgagcccgtccatttttcccagcaggctgtaggtgcgcaaccaacaggcccctcccctgacagctccctgcacgtggacacattcaacggccaggaggctgctctccccttcccgaagctaccgggccgcaggagggctgccggcgtgctgggagagggggtgcccctgctcttcctgagtcccaggtggttctaggtcaggtcccggctgggatgcaggctggagctctcaacctcccatcccacccccaaaaagggccaacactggaggaaagagaagcccctgacatccccccaggaaagaagaccccaggagggctcagaatcttgcccccaggccctgagcaccgaggcctgcactggctcagggctcaccctcatgctgtgccaggtggggaacccctaagggtcacccttgttgcttccacatggtgtctggattccacaagcaggggacaacagcagtgacagccccgtcttcagggatgcaggcagccaggtggcccccggacctgggaggacgcccaggaagccagccctcgtgtcctgcccaccgcctcctcctggccccagcatcgctctctcccggccactctgattcccccttcagtgccttgtgctggtctctttagccacgacaccttctccctctccctgcactgggcccacatctctacaaactggaacccagggttcccggcctctggagcctcagggtcttaggttaccagcctgaaacttcatctttaaaaccccataaccccaccgacagggcagtcccaaagaagaaccacaccaggtgacaatgttggtgacaacaaggatgacaagagccaccactcgctgaggcagctgctgccaggtgctctgccgacaagccttatgacttttttgcccatttgtaaagatgggggtgattagccccactcttcaggcagggagactgaggcctccgtgaacttgctaggagctgacagtctggcctgcaaggctgggccggacccagcgtcctggtgatatgctctctggcagggctgtgtgttggtgtctggaggctcccctggcccgggaagcccagggcaggctcttgggaccaggtcaccatggcctctgggccatttctctttccatcatgagagctgctttgccgtagggcacccggcctggggctcggggcgggcagctgggcctgtagcctggcttctgcggagggtggccctcggggagaagcgtcctgatggtggggtcttgatgcagggacaggtttccatccaagtggctctgccacatgggagaacagaacagtggctgggaacacattttctgcctagggagcatgtccctttggagctggctcaggcacagggacgggcatcttgacacacttcctactcccaacaaatgctcatgaggctgtcctcaccacggccagggccgccagaggccctgacaccctcccagcgctgcgcgtggggtccagtgactggtacttcctcaggccgcccgagaatcctccctcacaagcctgcagggacacctctggcatgcgaggctgacagtccacgactctgataaaggacctgaatctgctcgaagctcacctgacccagccacagtcaagcaaagcacccatggccggtcccacatggcctgcaggggtgtgtccccatggggggatcccgtgtccacagacctgggaggtctgcatggaggcatcaccatcattgcaaagggcctgcctcctgcctggtgcttgggctgtgtgttgactgggagccactttaaatgggaacctgccccctggttaccacctaaatgagtctgttattacactgatcattttcatataaaagttggtgaaaacctatcatctctggaagcaatcgagaaaaagggttttccccttttaaaaaaaaatgaacaaaagcttcagaagcccccggtagagtaggagaggagagaaggaacagagggacatttaagagaccaccggacagcccgaaagtgagcggacaagacactgactcccggcggccgcctgcacctgccccgctccggatcggtgttttctccaccctgagagaatggtcagagccatgcgcagaagacacgccacacacactgggcatcacttggtgccaggacctgggctggaagctctgggaccgtgactgtcgccgttctacccatggggacactgaggctcagagagccccgtagctgagaagggaatcacaccaacagtcaccgaccccaaagcccagttcctggggctgtcctagggctgcactgctctgcctcctggctgtgcctcctatctgatgatgacaccagaccagaagcaaggcaggaggtccaggggcaccccaaaccctaaggcccccagcccacccctgtggcccctttgaaaagtgcccctgacctggcctgaggactctaggtggggaagccagggcaggtggtgaacctcaaggctttcagagcttcccaagaccgcctggaggcgggaggacgagtctgggctggggagaaggaaagacagagtccccagcgaggggtcctgcccgcatggagccatgtctgctgctgctggggctggggccacgctcgggcccgagggacaccacactgcctgacttcccaccaggccccgcaccactgcggactcggcttcaagcatttcaggtgagctgggcccagtgatggccccagtccctccctgtcgaggcaagtcttcatgtaggtggaaaaagctcccaactgaagcccagcggataacatgcctggtgccagcagctctagtgtggccaaaccagctttgtgagctccgcctttcaatttcacaccaagtcaccttggcccgaggtttaggtggacgaggggctggagtgcagatcccagccttactctcctcacaccatgctctaccgggaacacccacatcagccacagcacagctgagctggcagccttctccacctggcaaacttctactcgtctgtcaaaactcttccctatcattgccccttcttcacttcaacccctgcaccagcagggccagagggaaaagcaaggagataggtcaaagggcagcaggtagaggcctgtccaaggtcagtgggagcccaaagaggagactgccccgggtgacccccacccaccagctctgagctcctgcaatgggtctcactcatccccataccccagcacccagcccggagcctgcctgcaccaggcactcacacacggctgtgagtggccacagccacaagcctggacacaggtccttctatccatttgataagaggatgcaggaggttgggggtggggggaatggcaggcacttgaagcaaacaggagaactctggggaaagacagacctccatgaagagcctgaaagggccctggccgtgggacgggcttcacacccgggctcactgcatcctcacagaaacaccactgtcaccacaggggccctgaggctcagagacgtgacgtgacttctgaggtcgcccaagaaggggaacagggccagattccaaagcgaatgcacatggctctcaaccctggccctcagggccccagggtgacgcctctgcagagggacactctctctccgtggagtccagaaggacactcgaggggcccgcgccctctctcacctgacccaggggcagagcagatgccagcacctgcacacccctagccccactgagcaagggcagctggtgatggagagggcctcggaccagaactcggctgcagtgggtccactagagcctcacactgtgaccttatttggtcatgatgcagatgtaatgaaggtaaggactgagatgaggccatgctgaaggaaggtggccctgactccaatgagagtggcctcagaaaaggacacagagacgcggggaggccatgtggagatggggacagagaacgaagcagccccagccaggaacacccggggcctccagcagctgcaggacgtaggaaggatccccctgaagcctctgcaggaagcatgacccgggcacacctggactttggctcagtgagactaggagtctggcctccagaacagagacatctctgttgtttcaagccaccatgtttgcggtcattgttacagccaagccaggtcactcacacagacgccttcaccctccgtccacaccacaggactctgagcacctgccacataccaggcagcatgggccacagagtccccagggggcacagtttgacttttccccgaaaaatggagagaaaatgacagtgactccaagcctattggaggaagtcagttaaggaggcaaaagtttacaggccttaattctaaccacatttactactgttaagaaaaaggagccaaaacttggaataacacacacgggcacacatgtatgcacacacacacacatgcatgtgcacacaaacacacaagcacgcgtgtacacacacacacacacacacacacacacacacgacttcatgcattcctggtctggttggagcacctcccaggggcagcctccccctcccccgccccactccggctgactcctcccctggagaaagttgttcaggcgcaaatgatttctgtcctgatagaggacatggccccaaaggtctcagtgtggtcaccttgcaaggcacggcccgccgtgtccagcatcctgcccgacctcccctctctgctgacaaggtatgtggttcccttgctcgtgagttgacagacccgtggcccgagctccgtgggtatttgtgtgaggatcatgttttttaactttctgagtacgtcaaattctgaacccaccacacggtgcacaaatgcctcctccagagatgcctctcctctgcccattttcctcatggtatcacctctgcctccagtccacacagccccaacctctcaagatgcccagggacaggccagcgtggattgaggaccacaggccatgggctcaggtatggaccaaggatgcaggaacaagcaaggtgcacggctgagctgccagctctggcctccgtttccccatctgggaaatgggggttagacagagcgggagctgaggcttcttgacttcagaggttcccaaaggcagccctgccagagcaggtggccaagccaacccctactggggtttttgaggtggaccatgaccggggactctccctgcaggccgtaccctggaaccacccagccttgggcttcgggtaggaaccatccacagggcagcctcactcgttccaggattccgagtggaagtctcggtgcaccaaagcgctcacctgtctcggatccttcatctccacatacgcagggagatcccacccagccctgggggaggagggcgtggccttcgtctcgttctgttctgcattcctcccaaaagcgctcgtgcaaagctccacagagagctcctcttgaaagccagttcgtggccttcctgcagggctgccagctccccgaggtcgttccctttctagctctcctgcccccacgtccccgtatgcccccactccccgcagcatgactcactgccccactcaaggaagccaccaggagctggactccaggcccagcctggccagacccagccacagagaaaaaccacacggctttgtcttatgtccacagctgcagaatgcaagctccttcccaaggcccagtgtccctctgggtgggagatgcccccttttaggcccacagggcaaggctaagaggagctcctgccttgtctgaggacgaaggctgcattcatgaaagtataacctcaaaaagagggaggtgactgtctcctgccactcagtgccgatcatgccacaccggaatgctactccacccttcacccccgacgagctgccaggaccctgtcacaaagcccttcagcagcttcctcgtgccctcgcttaataaaagaaaaattctaaatccttcctttggcctggaagcccctgcaggaccctccagcccttccctggagaaccgccccttttctactgggctcatgcctctcaccttcccctaagcttctgctccccaacccgcctcgccccacccctgcaggactgtgctcagggggacacgtcctccgctgtgcagccctcacgggtctcctgggctctccagcaacgccgcagctccccccggagcttctctatcttgtcttggttctcatccatcccacccagcgagaggccagtagctctgttcactgcgtgtcctcagtccagagctcaggagccatacagagcaggcaccctataaaagcttcaggactcagccagcaagcaagaaccaggaccttggggccgaatccgaaatgagaggaaaggggcaaaaaagctggatgctgggacagaaccacgatgatttggtgatgagctctgatgaaacgctgacagccccttccccaaacagaccccgactgacggatctcgccacacgcctcgctgccagggacggagctgcccgtccacagagctcttgggctgggcctgtgactggacgtgctgcccgcactgcagtggcgctccaaggcagagatgcccgctgttcctcagcgggaaccacccatgcaaggtcctgctggtgggacagggccaggggtgtcgccgggcagcctgactgtggagggaggctcctgggagaggacaggttatccaccctgtcactctaccacacagccagccattcctcctccagggcttcagcctttgacggacctcgaagcaaaccacgcctcatccgtggctccctcccttcctggccgagggacagcatgaacaaggcgctgaaaaggaccactgtaccccacacctgctgaggactggggcgacagccagtgtgacctgccagccgggcactatcagctcacccacagatgaagggaacaccttgctgagggcaggttagggagctgtcctcccccgatccctgcccactcttaaccctctggggctggccagtgtgctcacacctgctgggcctcgtcagctctcctggtcccctctgccactggaccacaagcactgcctgctccctcgtgtctccgggaaccctccaagccatggcccctggagagcaggctccaggaccctcctcacagggaaggggggagcgcctttcctgaagctacagagcacacagggaagcacctgcagggcttcccaggcaacgtgcctgagaatccagccctgggcctgtccccggctgcctggacagggaggggtgtgagctgtgctgacggccacctggcgggtgatgcaggggaccctcctagagatgagggagagatggacccgggcgcccaatgcctaggctcagggccgcgtggtaagatgcacctgtggggtcttctacaactccccaggccccagagcagacccagacccttccaagagtggaccccggacatggtatttgtaacaagctccccagtggctctagtgagcagccaagttcaggaagcattagcatagaccccttcgggctcctccaaaggatccccgagggacagagagcttggcaccgtcccctgatggggctctctcgagacttccgtggctggaaacgccatctccccagcctctgacagcctgggcattgtctaacccccagaaacgccatctccccagcctccgacagcctgggcattgtctaacccccagaaacgccgcctccccaacctccaacagcctgggcatcgtctaagctccagaaatgccacctccccagcctccggcagcctgggcgtcatctaagccccagaaacgccacctccccagcctccgacagcctgggcatcatttaagctccacgtgccacctcttttcatccttgtccacatcctaactttaaagaaccggccacaagggtgcagaagggagaagtgggggcccgagatctccgctgggacagccgagccacttggatggccacacctctcacagccagttagaaacatccagaaccccaatcctgcccctgccgagctcccacaggacaggaggctccacaccctctccatcaaccaggctgcggctcggggtgggtggcatcctcaacaagggaggacggggtccagagggggcggcccctgcctcgggacaccccaagagtcccacttacacaagagttccacttgtgtaaactctcccgcagacagggaggggccaaggagccccaggagccggcagccactcacctttccttgaaatcgaggaagaccttggccagcgtgctgccccccaccatcacggacacgtcgatggccctcaggaagctgtgatgcaccttgatcaggtcctgggttgaaaaccagccgtgagtgcctggccaggcccacccaaggctagacgggagcgccgcccttaaagtgcccttgttgttctgtagttccctcaaggaggggaggggcccgggtgctgggcctgcaccccacatctctgtgcatgccagggtgtgattcaggtagaaggttctatggcgatggtgcaacagaagagccagtacgtgtgggagggaagccgcccacagcccgcaccagcccatcagacacgcagcggccgactcggggcgggctctgcagacagcgtggggcggcacagcgcagtactcctgtgctcaggccacaccccgggacccccatccccaccccgggacccccatccccgccccaggcctctttctgtctgtgctcctccatcctggccacagctcaaggacagatgaactctaggtcagaggcacagactataggaagctctggggtccaagccagcctcatccagggcagcgtgaccagagctcacccttgcagctaatgagacggccagggaggcaggacacagccaccgcacgggctgctggcacctgtggccgccaggccaggaggaagggccaggagcagcatgtccccggaggaagcccacccatgcacggctgccggagcctggtgccagcgccctgctctgctaaccacgtctaggtgactctttgcatggggaactgcctttctatgactgagttcagacacccgcagggcaggcgagggggtccgctcaaaggggtggagggacacgtttctctctggccgctgacaaaaacttcatttacattctcagcgtcatccgtgcctccagccacgcacgtcagtgctgccctcacccgcagacaagcggagcccagaaacctgctaccctggctcctaaatccaaagaccctggagagagcggtgggggctcctccttccggccagcacgagccaccacggagccacaggggtgcagctctccaaggccctgaggacagcaggacatgtgtggccagtgccgagttagggccccgagcctggcatgagcgatgggggccgggacccttacctccaggttaatgaagacagctgccatgtccgccgggctcagcaccagccgcagggggctcatgtagttctggaagagagaagtccacctctgccaccctgctgctgttgcccaccctctcaaggtcacagctgccaggggagggtcccagggcagctccgaggcaggcactggggtgctccatgcttactggggtagcctgtgttctggccacatcgggctccattctttggaggtgagtgcagggcaggaaggtgcgggggtaaagattctaacgctcccagcgtgacgggggcagagtcctgtggtggccactcacacacagggtggacttgggcactatggctgccctgaggtgggcgttggggttgtggcttgcggtgaggggctgagacccaggaggcagggccatcacccgtggggactctctggatggacagggccatggtccccacccagcactcaaacactgagcttgtgctcctgagcatgaccccaaaactgtcatcaaaagggatgctctccaccccgaggagtgccggtggtggggcaggctgtggacgagagtcctccagctccagcctcaggcgggatgtgaagtgaacatgaggacgtgtgaggctgctgaccctgctctggaggcccggccaccctctcctctcctgctccccgagtggctcctggtcagggcagccagccgctctgcaggcatcctctgggcccagctgctgcaccgctccttggtcaccacgtggcacagagagcatcgcccaagcaaacacgcccgggtggcggccccaggctgggtggagacagacctcaggagccctcctgctttctgcagcagcatttagccatggagggatacagaggccagcagggccctggcagaggctgacctcagagccaggattctcagaagccagggcatgggcagggcttcgagggaactggaaggacctgggccagggtgtacagatgtgcgtgcagaaaggccgctggccaaggaccagagggtggggcagcaggagggggcccggccggagcaaggccagcctgggcccaagggggcagcccaggtctcccggctggaggcatcacggccaccctggttggtttttctccccagtaaacactggcagttggcaatgaagactcagaagtgctagggaaatgtcccagggccaggttgaccaggtgcctacaggaggcccaggtggggtaggggaggtgaaggctgatcctcagcactctaggagctcagcaggccagcaggagagaggactcagatgcacaagagtggaagagctgggcaaggagcttggagtctgcagctctggtcactaggccgggccatgccttgtgcaggacactcccagccccccatggaagctttgttccattttacagatggggaggctgagtgtggagaggctggggagcagctctaggtggggtggggggaatacgcgaggagctagctcagtgcctgccttagagcaatgttcaggagctgaagccgtaatcccaccccgattaagctcagaggaggagcagggacaggcgcaggccgggacttcaggggcttcagaggaaaggagagggcaccctccttttgggtagggggtacctggaggcagagctgggagggccaccaagtctccttcgcctgtcagagaggccctatggccctgcctccggaatgcactcccaggagataggtggccctgcagtgaccacagtggccgctgccattttccagtggccgccatctgccctcaccttctcaatgtcctccagggtgcggtagtacttggcctcggtctcctggatctccagcaggcagcagttcctcttgtcatcttcagtcatgcccattttctagaggagggaagggggagtcagcaggaccccatgggcccggccacctgccacctgcacatctgcaccgcgacacccggacacctccacaaaagaggactccttgggtttggccacgaggtcactgagtgtgcagtgctgcagccagatgggtgacagagagggccaaccccttcccattcattttgcagatgaagaaactgacgcacggggaggggatgtgacgtggggacagtgccaaggaaggcttggaggcagagccttctagaatcccaggctcctactcctctgattctgaatctcgattcttcaccagactggggtgagggcctcagaagctaccccctccagcacaggagcaggagtgacttgctaaaacacctactgtgtgcataagtcctctctacgtggcagactgtgtgctcggctccatgcagaccacatccaccattgcacatgtcagtacagccacctgcaggctggactcttcccctgagtgtccactggtttctagccagggggcctgagatgaccccccaccgccagcagggtccctggagcctcctccagagcagggcctgcccccacctctggtggaatgtggccgggacaggattagagattgcctggcccatggtccagggtgaggtgacaggtggggtcactgtggggcagtgatggattttcccaacactgtctttaaggttctgttaggctgggtaaaccccacctgtcagaaggctctggagaaatggtgctgtgacccacagcgctcgtgtcggccctaagaccatcatcatcctccaagaaatccccaagggtccgcttgggtctgccaggctgcaggtctctaaggcaacgtgcaagatggggctgtgggtacaggaccacgggggtgccgagggtctctgatgcctgaagtcatgtgtgcctgaccatgtcttcctgggggcagggtcccgagttttctcagagaggtctgagacctccctgaaaggtcaagaagacggcgcaggcaggacgtccccagcctccccttccgggccactcacctgcatgtatctaatctgcaagcgtggagaaagaaccagaaacagcgccggttagcagggcccacactgtcctggcaagctgggcctgggacatcaggaacgccaccccacaaccagccaacagacccaaagccacatcacggcccctcgtgctgcccagctgggcagggcgatggctcatgggccagagctcccatagcagccccctacccaggctcaggaaatggcatctgccatcctctggcttcttcttcctttggggaagtcaccatctctattaccttccactggggctgttcagagagctccagacatgacagggaaggacatggagcagctgttttatctcagaggaccctggcaggaagcaggaactgccccttgcccccagcccctgcctggatggactggacagctcgagaccagcgggaccagcgctgggcatgaggacactgtgcagagcgggacataggcagcgctgttccccagcctggcaggttctgtggacactccatgtcctttcacatgcgttttctcaaagaggtctgagaccttcagaaccagggacagcagcgggctccagggagcacccactctcaccaggcatggatgggggtctcgagaaagagagcctgcaggatccagggccaggatcccccacacaacctcacaggcaacgcagccacctgctgaagtttacctgcaggacgcccagctttcaaacaacttggggagtgaactggccttgaccagtcagagctcattcccaagtccagacggctcgccggccgcctcgggacctctcaggccagctccggggaggcgaggggagcccccagcagcagggccatggctcagtcttccagccctaacagctacccagccaggctccccgggaaggcaaactggaggccctgctgcctccacaaagggccaccatccctcgggggagaccccccggttatggcggggaacaaaactcagtcgagacccttcgaggacaagcagagaaacctgctcttaacagtcagtttgggggctgtgagacccccagccctgcacctgcctgtctctcccagcaggatgccagcagagtgggcaaggcctctttagggatttgtttccccagctttctgcttctccaccaccagctggttactcccacactaaaggaaaacactgaaatcagctttctgagaaatttcctatttctttgggggaagccaatggcatcaaaagcctccacggttggcaagtggcatctcacccactcttgggagcctgggggtctgagggcctgtgacctgccctaccaggtccctgtctcctcattccagctccgctggatccccaccttccacatagcagctgctggcaataaacccacgcggagcaaactggcgtccgagagattattcgccagtgcctgcttggaaataaacatcctccaaacataaaagacgcacagctggctaattgggccaatattggtctcatcattctccacacaaagggggaaaatgacgcgtgctgttagaccatgcgccaagttactatcttaaggctccctgggcaggaacaactgaggggcctgcaagcccttggaaggagaatcccatggcaacacgggcgggggtcatgaccgtggtggtgtcatctctgggcacctgagaacatctccatagagaggaagggcacagagtggaccaggagtcagccagggtttccaaggatgctcctcagaggagctccgtggggactgggaaggaccaaggggtgcacctctggacgtccccctgcacccagagcagctccccttcggtggctcagacatggggacagctcggtattgtgttaagcaagggccaggctgctctgcgagggaagggaggggaagggagggaggagcggggcagggctcaccatgggctgctgcacctccaccttgatgatgtcctcgtagatgtcgtcccctccatcctcacacgggacgcagtcgtagatgtcctcccccaggtcatgctcgctgcacaggaggaggcgggttagaggggaggggaggctcccgccaccctgaccggggagccgcagagcacgagggtccacgagggacgcaggcggctggggccacagcgaggtcacctgcccgggcctcagtctacaaagtggggtgggccccgcctgcagggcgtctgtgggtgcgaactgggcagcgtaaggcgcatcctccagtgctctgcctgctgcctccactaggtgcatttcagagggatctgccaggacaaagaacccacttctccagccctttggtaaatgctggggacgtaggccagaggtccaggggcgggacccctgccttcaccagaatcttcccacccctacctgacaggagcccccagctcctgcctccagaacagaagcctctctcccctggcccaaggctgtgacctggagacctgagtgcttccggctcagccctggctcttgcagtccttggatccaaggtgcaaagtttccgggtacatggagggtgacccggagtttgtcatttgccttctgaaaccagagccaaagaaattcctaccaaaatctaatacaataaagctttgttttagctcatggtcctactccaacaagccacccctctgcctgcaggactcagctcacgggccacctcctccaagacacccaccaggatccccacttggtctgtgatctggactcttgcagacgctcgtgtactcgatgcagctccttggctacatttccagtgactctgtgagtggcagcggatgagcctggcccctccccacactgggcttcctcagccctcctgatgctccacacctgacctgctggggctcagcaagtctttcactgaatcagcaactgagccaatccaaccaccccctgttcccacaggccccgttgggggctcactgcacctgggggtggaggggcaggagctaccccaggcccagacaggttgtgtattcagtcctgcaagccctcacccctgcacaaggacacatctcacatcccgggctcaaagtgggtggcaaagttcactgctagaaggacggaaataaatgcagagcacccccttccatggccagcacgcagggaggcgaggcagggacagaagccggggcaggagcaatccctgcggtactcaggaacgggttccccagccacgctgtgtgccacggcctcatcccaaacctcgcctttgaatatcagctgtcgccttttaaggcttgggttggggaggaccattcaaggtctacttgagagagggagggcccgtgtgcattcgaggaaggccctcagcaccttccctggaggacacgctgcaatgcacaagccacacggcgtccgtctgtgggcaaagcatctgtgcctctctagaggggaagccgggggtgagcccagctcctgccttgtggagcctcccgcaggcaggcgggcaaaggaggcggaggaagctgttgctccgggtacttcattttctgcaccactacagtcgtgagtgaggtggatgaaagccggtcagaggagcaaagttggcagagggcagatggccctgggacagaccagactgatcgaaccctccaaccagcattcaaagagccaccgacccatgggcaagcccctctgtgtgccagcgcctgtagaaaaacagttattctcttgggcctcacagaatccttggcggtaacagcactgtggccattgtgcagattaaaacaaacaaactgaggttaaacagccagcaaggggcagggctgtggccctcgctcactatcctctcctctctccccacccgccctccaccatgagaggtccatctgggtgtcgctcagccgtgcgggagaactgaagccggggtaaaggcagccgtcagacgggttgggcccacattctggtgacagaggctcccctgggaacagacatgaaggcaggaagggtgtttgtgagctcacaggttttcttactaacccatctcaaaggtccatccccagccaggtccggcgactgccttagaaactgccaccagcgatgacacaaatcacctcccctgcctctccagatgctgtccccaaggacacagcccccacctctctgcccgccaggctaccagggatgcaggcaagtgactgcaggggttgttctcagcggctgccagccaccccacgtttccgtcacgtggcagagcgaggctggcggcaaagcctctgtcgaaaactcttgacagctggaggcgaggcgagacagggaagcttccaggctgctgaacgagacaactcgagggcagatgaggccactcagactgtctagagacagacgtcagcttttctccaacaggccaggtggaaggaggggggttggccgttaaatgctgcaagagctgatgacatggatcaaaaacggctgcaagccggacctggacaggggcctggagatcgtcccgtgcagggatggcaaacggccacactgtggggtgtcccaacagagcccagggctctcccccaccactcaggagcctgttcataaaggcccccatgccgcccccatcacaggtcgaccagaaccggttgctgacgacatgcaacgtctttcctctcccccaggagccccaggcttgtcacagtgcagatgggaaagcccagcccgggctgctgcaggtctctcagatgccatggacacacatccttcactcgtgcctcccaccgcagtggccttgcactgccatttactgaggactctacgacgtgcccggctctgacaaggcctgaacgtattccgggaaatacaggatacgatccactgatcccgggatggaagaggcacgagctccatctggagcccaaacatattaaggagggagagaatagggaaggctgggatggtcagagtcttcctgaacagatgagactcgaaggatgctttgaagcccgggtggacctagaaaaggggtgtggaaggcagagtcccccgcccgcctccctcttccctggccccatcttgaagacagaactgtcacgcccggatctaggtacaagtccacgtctgtgtagcacccgctgcgtctgaagcttggtgagaaatgccaagcatagggttctcataatatttttgctaagctttttaaggatcaaaatacgcccttagtggtacctttctgacaagtggctacacctgtgtcactcatgccctcccacaccatagagtattttcatctcaccggagctcctgcccttccccatcagtctccttcccgccccgagcaaccacccttctgactgttcttcaccacagacgagccttgtctgtagaatgtcaacggtgttgtgcgttagatttgtttttgtgcctggcttcttcccctcaacattggatcttgtttgagacacatccattctgacttgcccacatttgcagctcattcctgtttactgctgagtactaatccacggcatgaacaacaacgtgctacccatcttccttctttatggacatttgggttgcctccaagttgttgcttattgtgaataaaagctgctatatgagcattcaagttgtgtgtgtgcgtgtgtatgcacgcacgcctgtgtggtgggtggggggttacacaggctttcttttcctttggaaacaaaattccactaggactggaactcctggtcaaaggggaggtctagactcaacctcataagcagctgacaaatgcttttctaaagtgggtgcattctacacccccagccagcagcgctcaccagccccagctgcgccacatcctcatcagcttctgctgttgccggtctttttccattcagcccccagagtgcgtgtggagtgaaacagaactgtggttctatttggcactttcctgatggctaacgctgctgaggggtctcctgcgtccttactgtataccttcctttgtgaagagtctgttcaagacttttgtccatttctaaaaattggttgtctgtcttcttattgaattcggtgagttcttcacatattctggatactagtcagatatgttttgtgattcttcccccagtctctagcttggctattcactttcttaatgatattcaagcattcacctttaatttaataaagcctaatttatcacctttccttagtcgcatcctggctctgtcctgtgtcctaagaaatccttgtgccttgtctaagaaatctttgctgtctttcaatcacaatatattttcttatcggaacttcatagttttagccactctgtttaggtctctgatttcatctcaagttaatttatgtgcgtggtatgaagtagcagggttcacttttttcccataggaatatccacatgttccagaacaatttctcaaaacgcctctttttcgagcagggcatggtggctcatgcctgtcgtcccagctactaaggaggctgaggaaggaggattgctggagtccaggagtttgaggctgcaataagttatgatcgtgccactgcactccaacctgggcgacagagtgagaccctgactcttagaaaacaaacaaacaaacaaaaaccttaccattggattgcttggatctctgtcagaaaccaattgaccaaataagggtgagtctattttggaataactactctattccatccatctatttgtctatctttacactaacacttctgtgtcttgatacatttcatagaaactcttgaaatcacgtaatgtaaatctagctttgttcttctacaagactgattaagccattccaaggtcctctgcatctccatgtaaactttacaaccgtcttgtcaatttttttaaaaatgtctgctgggatcatggtagacactgcattgagtctacagtgtaatttggggagaactgccatcttaacgataacatcttccaatccataaacatagtatatactttatttaagtcttccttaatttctctcagaaacattttgtagtattacgacagaggctttggaatttaggaagaattgggccttttctttttcaatgtttattctgcttccttcattcttcctcttctgagagactgcaataatacccgtgttagacgtcctgacatcatcccacacgtctcaggctctgtcccttctttccaggcttctttcctccctgttatttgaagtgtgtaacttccagcctggcgtggtggcgcacgcctgtaatcccagcactttgggaggccgaggtgggtggatcacctgaggtcaggagttcgaggccagcctggccaatatggtgaaaccccatctctactaaaaatactcgggagactgagacaggagaattgtttgagcctgggaggtggagcttgcagtgagctgagattgcaccactgcactccagcctgggagacaagagtgaaactctgtctcgaaaaaataaaaaataaaataataaagtgcgtaacttccaccgtactatcttcaagttcaacgacttttccctctgccgtgtgcaactttttaatcaagctgatccagcgagtagagtgttcatttcagatatcgtgcttttcagttttagcatttccatttgccacttttcagtagtttctatttccctgctgaggctcttcatccgctcattcatttgtcgtacgttttcctctaagtccgtgaccgtatttataatagctgctgtgatggctgattttgtatgtgaatttgactgggctaaggactacccagagagctggtgaagcgttatttctaggtgtgtctgtgagggggtttccagaagagattgacatttgaatcagaagaccaagtaaagatttaccctcaccagtgcggacaggtgtcatccaatccattgagggcccacgtagaacaaaaaaggcagagggcggccgggcgcggcggctcacgcctgtaatctcagcactttggggggccgaggtgggcagatcacgaggtcaggagatcgagaccatcctgtctaacatgatgaaaacccgtctctactaaaaaaatacaaaaaattagccaggcatggtggcgggcacctgaagtcccagctactcaagaggctgaggcaggagaatggcgtgaacctgggaggcagagcttgcagtgaggtgagatcgcgccactgcactccagcctgggtgacaaagcaagactccatctcaaaaaaaaaaaaaaaaaaatgggtggacttgctctcttctgaagttgagacatccaccgtctcctgccctcagacatcggaactcctcctgggtgtcagatcttcagactccagaacacacaccagcacctgcccatcccacaccaggactcaggcctttggccttgggctgacacatcactggctccctggttctctgacctttggactcagacttaagttaaatcactggctttcctgggtctccagcttgcaggcagcatatggcgggactttctggcctccataattgcataagccaattcccataataaatccccccagccatctacagagatcccactggttatgcttcttggaagccactaattgcaacatctgggtcatctgagggttggcttctattgactcttcttttctgagcatgactcactttctcctgtttcttgcgtttggtgatttctttcttggacccgagatgctatgaacgatactcagcctcccgagtagctgggattacaggcactcaccatgatgcccagctaattgttttatttttcctggagacggggtttcaccatattggccaggctggtctcgaactcctggcctcaagcaatgtgcctgccttggcctcccaaagtgctgggattacaggcatgagccactgtgcccagccacgcctgtgttgtttttctttctttaatccatgactacgaggaacattccttcacacgggctcattcttcatgcaccacttcccattaacctcttgtcattcgcccggggcaccgaggttaaaagtgagcaacctcacacctgtaatcccagcactttgggaggccgaggtgggcggatcacgaggtcaggagatcgagaccatcctggctaacacagtgaaaccccgtctctactaaaaaatacaaaaaaaaaattagccgggcgtggtggcgggtgcctgtagtcccagctacttgggaggctgaggcaggagaatggcgtgaacccaggaggtggagtttgcagagagccgagatcgcgtcactgcactccagcctgggcgacagagcgaggctccgtctcaaaaaaaaaaaaagagtgagcaaccaaaaacactagaggagaagctgtgtttgggaatctgtctctgggacagaatcatcttaaacacgcagacaacatcccttctctcccttccatccaatgtcagttatccgagcctgttgatactgggggggcggaatctggggtcacccggttctgcctgccacacccttaggctcccttcctaccgggccctccttgtggagcccagagcactgaccatcagcctggccacacggatggcacttttcattcgtccaaagcgctctcccaaccatctggattctggtcaatgaacactgggagagatgggttcctctgtgtcatttgaaattctaaaacagtggaactgaaatttcatgacacacatattctaaatgatgagagagggagaaataaagggaacggtaaagaagtggtttttcaaaaaataaaattaaattaggaaaataaaatcaaacgtatttgataaaacaatgttaataatataaacttagtaattaagataaaaacctaccagatgtaatgggtttaaccagtatttctcctatgaccgattctgcatcagaaatatgttgggtccttgggacacaggggacaatggccatctgtcccaatgacctcacagtccaagtggggagactgactaggcagcagctgcatctgaatcctggcaccaggaaatctcccaggtacggaacagatcctagaggcagacactactgtggtgtcacttggggaaacaagctctgctccctaatagctcctttcctttggccatcaccgacgtggaaatgccactgctacctggcttcttggcaaagatgccatctccataaacaagtttctttttctttttcttttttttttttttgagacggagtctcgctgtcgcccaggctgaagtgcagtggcactatctcggctcactgcaggctctgcctccggggttcacgcctttctcctgcctcagcctcccaagtagctgggactacaggtgcccagcaccacgcccggctaattttttttgtatttttagtagagacagggtttcactgtgttagccaggatggtctcaatctcctgacctcgtgatccgcccgcctcggcctcccaaagtgctgggattacaggcgtgagccaccgcgcccggcctccataaacaagtttcttgcacagggaggtgacacacggccagtctcagtcacctggaaggcaggttcacttacgtcatgaccagcaggcccagtgtacctgagggccacagctgtccactgggaggaagagggaaccctcaggggctgggctggaggaggggtatactatgagacccactgaggggtctgaagtctcctgggagtacagggcagtgacagggcaggagggtcccattgtgcaaggaccctcacctcagcgttctcactagacatgagcttgacgagaactcagcgaagacgcggcacacggaaccagagcgccagccccacatggccctccacgcaatcccacaggggaggggccgggctgtcgtgccttccctctggacccagcccactctcccccagtccttgaaaagcacctcaaggccctgccacgtctgcaagtggctctggaatctccgtggcacaattacatcactctcctgtggctctgtggcaggctgctgtgtcacacactgatccttttcacatcagtgtctcggctagaaagaagcgtgtggaggctccgtgtcatcagaggctatacttcgtggaaaaactccacacccatgccacaccagtgtctggtccacagagcaggccagtcctcatcacttcggaacaggcgggccgcagtgggtctcttgttggcaggaacttgactgtcgctcctgagcccctggaggggaggcagcgagggaaactagggttgtctttgtagcccttcctgtttctagctctgtaactgcaaccaggataacctaagcttcggtttcccatctgcaacaggagagtgacagttccaaggatcagccatcatgtacaagaccagtagaggctgagcatacagtaggtgctcaataagtgggagcatggcctatcaccccagagggcgaaaggaggggctcattcaatgagacggcatttagcacaggggccggtctcaacacatagtgtggtcagcattaaaaatgacagattttttaaaacctaggagactaaaaagttggatgggggttggtgctgcgttagttcctgctcagctgtgttgcttttgtgggtttcagggatcattcttctctgtccagtggtccatgaggaggcccgagatggccaggcaggaatgtggaagcccagacgtgaatgggcctccacggccagacctgggccccagcccagctccctccaccccaggccagtgaccacccctccttccttcctgccccgtctcatcctttcactcctgctgttttctgggagtcagctgcgctgacagatgctaaatcccgaccattatttttgtcctcacaatagcttgaaatcttccaggaggggccccgagcacggctgtagctctccagggacggcaaaacctgccaccttcaccttctgcccgagaccctgaggccccagcccaacaacctcgcccacctgccccgattctgttacagaaaggcagctgctcagaggccattgcccccgccgcccacagaaaatcaaaagaaaaccaacaaactctgctttctgcccctggtgagcctgtgtgtttacggcggacataaaatagtgttgctgacaggctgggatgcgccgcactggccccgggctgtctgatgctgccaagcagggtaccaagctgccattagtgtgttactaggaaaccgagtcggatgtttcctgacctccgtccacacctcagggtgcttcatccccaggggactggggtgggggcagcagagagaaggcgcatcgagcctctgaagaagccggctgggaactggatggtgtgcatgtggggaaggacggacggagagatagacagacagacagacaagaaccgctttacacatcagggagcttgttctcacacgccctggcagaccctcaccacgacccatgagggagggaggccttgctttttctacaggtggggaaaccagggctcagagagggcatgagagtcacccagctcgccaagccacataggcgggtacctgcacaggccccagctaccagattcccggaaggagacccgtccaccggactgtccctcctggccgtaactccctctttttgggggcttctttctaagcagtaaaagagcctcccaccatctaaaaatattcaggaaccaaaaaagaacagcccctgggccaggtcacaaggactaggcccaggggaatgtcccgggccacagcacagggtttcatttccccctctgctatgtgaggcatgctgtgtgacctccggcaagtcacctaccctctctgagccttaatttgtgcaactgcaaaatgggggctggagcacccaccttgcagagttgtgagggctgagatgaagcggcaaagcccagggcctggctctcaggggacaggagcagggattgtcgaacagcgtatggacctatggctcagatcctccagtatgggaatcgtgaatgctctcgggacctcattatccccagcccttcctcctaccacagtgaaccaggcccaggcctagttaggtgtcctctctgtgctctgctcctttatgaatgacccttatggagcgtttatctcagcagtgagaaacagaagcaggaagacaagggaaagttggtggcagagactgtcctgctgtcctttctaagcatctggtgaaggtgaacttcaattcagcctggtagggttgggggctgcctcttagagaaggtgacctgtgggttgggttttgtagaatgaataggagttgggcaatcgatataggagatactacgtacgtgatgggacttctacaataaaacccagcatgtgacgcttgttcattttagagcaatatttcttaagtgccactgtgtgtcagtcagatctacgctgaatacaagggaaataacgtcaaaagggagaagtcttcctcttcctggagttccagaacagcacgaggagggcgatttagagggggagggaccttcatcagacacagcacagccctctcattcgggccgaagcccagctgcctactccttcctggaaaatggcaagatgaatgcgtatgtctttaaagctgcccttctgcgccggtcccctccctctgcagagactgcattaaatgagaccagagagttgctgtgaccgaatcagtcctgaaagcactcgagtttaacgaggtattaaaaatgaaaacccctggaagtcccaggccatacctgctcacacacacacgggaatgcggagcgggcagggtggtcacgcgcacctgctctgcgtgcgtcagagggttcccctgcgatctcccactgagaaggaacaaacggcctctccctcagtggtgggggtgggggagcagggtttcgaggtcactgaagcccccagccacgtggcagcagggcctctggagacagctggggcccactgtggtgccagagtaccaaggggcccacaagatgtccgaggggggcagggagggtccctgaaagtgtggggctctcatcccaacgagctgcggtctccacagccagccccacagggaagtgctgatggctctgttaacagggaaggtgcggacagggagctcccgcccagcagtcccacagccacctcccgacggggactgggcttgtctagaccacaggagcgagaaaggctggactgcctacagaggatccccaccgagccaggtccaccagccctcagttcccgagaacagacacagcagagaccaggaccctcctaaaaccccagcccaaaacggccctcagttcccgagaacagacatagaagagacccagccaggacactcttaaaaccccagcccaaaacaaggtagtgactggcctggcacagggggtaagagcaggtttcctaaatcacactttggcaaatcctacgcactcttcaaaatgaacacctcctccaggaaggcttcctgccctcctggcttgtcagggtctgcccccagaggctgctgcctggacagcacatgtgggaggtagaggaacctcgagtgagaagtgcaggggcccacaacggggtcccaggtcccaggtctgtggggcagggagggctcctttagccacccctggggttagggaggggtggtctgacaatgacccttggagagacagagctgggctcaaattgcagctctgccccctagttctgtacgactctgaccaggtgccttcctctctcagagccccgtctccttcctgtccagcgagagggctcagggcccggcctgcagcgctcagggagatgcaactggaagcgtcttgacagagggaccctccggggacgctggcttcattcactccattctgccagtccccacagaggcctggcctcacagagtcacaccgaggagcaagagacccttggcagcatttgagggagccacatgcggccaaggagaagcccaggtggggccgagcacgcagtcttaaagggtctgttgtgcaaatgaggcaccacggccagtggggaggcagctccaaggagacaatgccacggtccagccaggtgtccttgtcgatgaaggacctggggtgggggggcgggggacaaaggcctttctgtcccggccatcacccgccttaagaaacgccccgtcttccgtctctccagtctcccctccatccccacacgagcctcgggccaccagggagggacggggggatgcctgtcaacacctcctctggggaagggggcttcattccggcctccttcagaccagggcaggctttgcatgtgcctggggccgggggctgtctaacagggctggattcatttgcttgtttctcgtggggccgttttcgtggagtctgctttcaaacttgtcccctttggaaaaacaatcctctggggtgaacataaggtgtcccaaacccagcctctcccagctcaactcgggctccacactcaggcgtcctccacaacgcggacctcccagagtgaagatgaacatacatgagctcaggagatggtatctaaacaaacttcctctgggagaggtgggcagggtgaggacaacggcggggagggtgggccatagaggacagcggtttgttcctcactccttgtacccctgcagacaaagggcacagcacagagtggccaaggccccagggcaggatccaatgggagaagcacggcctctcccctcccaggtcgccgccagcaggcagctcccactcactccccatgtagaaagaagacgtccaaacctcctcgacaccagaaactccttctacattttatgcaccctaaaaaattatcccaatgatgctaacatgacacatttaaagctgcacagtcattttatgatgcaataaagcatgcagctctacattcgcggatacattacattccctgccgtgtcacgatcacatttgtttaagcctgaaaatcacttcaactcccaggaaagtgaaaccagtgttatgcaaagcaggctcctaaatcataaaattgtggattcctcaagctcagtgggattcacagaccatctgggcagatgctttcgtttcagagactgggaaactgaggccctgtgtggcatttaacttgcccagagaagcagccccttgaaaggaaaggaaaggccagctagaccttgggccctggtgacccgccacactaaagcagccagcagctgcagcctcacatccaagccctcgcccagagccctggccccagaatctccctccccgctcgcactcaggggcagctctcccttcaaggatgctcctgctcagatgctctctggggagaagccaggaggacacgcggttcctgacagagcctggctgtgtctaggatcactccctcctcatgcagccaccggagtggcggggtgccttcccacagcagcctgtgaggttgcaggaccctgctctgcagacaaggatgctcctggtggggcatgtttaccagctggctgtcagacatctagcagcacactctgggaagaggctccaggtccaaccacccctcccccagccacctaggatgaagcggtggctaaataaagcttggtctcatgtccatgtccttcctttggcctctcttctgccctgagtgggagctttcaaatttctcccgtgtcccttcaattcccctaagaattctcggggacctctgacctgccggcaccacgggagggagggcagaggcaggcggcctggccctgctggggactggggtgtgcagcctacttcacagacaggcaagggcaaccctgccacagcggcaccagtgtcctcgcaagacgcactcatcacggcgctctgtggcacccaatccgggtgccctttccaaatcctcctccatcaaggcctggaagcattcccagggccccccacagactgcagcggaccacgcccagcctcagtgaacagaaaatgggaactaggaacgctggctgcagtgccaggagggggacagagggccccaggactccaggccagagcaatcagagagatgcttcttgaagctggaaggaagaagccaatgtgccacctaccgctgcgcccactggggctgaccactgagcatgggcatcgccagctactgctgtgcccactggggctgaccactgagcgggggcatcaccacctaccgctgcgcccactgaggctgaccactgagtgggggcatcgccagctactgctgtgcccactggggctgaccactgagcgggggcatcaccacctaccgctgcgcccactggggctgaccactgagcacgggcatcgccagctactgctgtgcccactgaggctgaccactgagtgggggcatcaccacctaccgctgcgcccactgaggctgaccactgagtgggggcatcgccagctactgctgtgcccactggggctgaccactgagcacgggcatcgccagctaccgctgcgcccactggggctgaccactgagcacgggcatcgccagctactgctgtgcccactgaggctgaccactgagtgggggcatcaccacctaccgctgcgcccactggggctgaccactgagcacgggcatcgccagctaccgctgcgcccactggggctgaccactgagcacgggcatcaccacctaccgctgcgcccactggggctgaccactgagcacgggcatcaccacctaccgctgcgcccactggggctgaccactgagtgggggcatcaccacctaccgctgcgcccactgaggctgaccactgagtgggggcatcgccagctactgctgtgcccactggggctgaccactgagcgggggcatcaccacctaccgctgcgcccactggggctgaccactgagcacgggcatcaccacctaccgctgcgcccactggggctgaccactgagtgggggcatcaccacctaccgctgcgcccactgaggctgaccactgagtgggggcatcgccagctactgctgtgcccactggggctgaccactgagcgggggcatcaccacctaccgctgcgcccactgaggctgaccactgagcacgggcatcgccagctactgctgtgcccactgaggctgaccactgagtgggggcatcaccacctaccgctgcgcccactggggctgaccactgagcacgggcatcgccagctaccgctgcgcccactggggctgaccactgagtgggggcatcaccacctaccgctgcgcccactggggctgaccactgagcacgggcatcaccacctaccgctgcgcccactggggctgaccactgagtgggggcatcaccacctaccgctgcgcccactggggctgaccactgaccacgggcatcgccagctaccgctgcgcccactggggctgaccactgagcacgggcatcgccggcatgcggccaccttcctggacacccagcagtgctgccccctgcagccagcacaggctgacccaaggtgtccttctaccgtgcggagaaacactgtcactgcagtgccaccaagttggggtcacagcaggcatttcgacgtgggccctgtgccttcctgagggagaggtgatcctccctgtgagtccccggggaacttccacaattctgattcgttacaaacaccaagccttgtcccacaatagcacaatacgctggacttgcgctggaacaaccctcagccacacctccagatggggagccccaccttgccctccagcctcgccttccacaccctgcacaactcctcctgctgggatagtgccccggtcttcagcaaactcctccttgggtgctgaggcccagctgtcacctcttctgaggaggcccggctgtcacctcttctgagaagctttccttgctttctgacccagcactccgccagccccactctgctcccacagccaaccatcttgtgcatgtcactcttctgtgtacaaacctgcctctggaccccaggctgggagccccccagtgcaggcatctagccctgggcccccaagagttgggcaggaacgaaaagggaagcgcagtgcctgccaaggaaaagccattatgcaaatgcaaggtactgattattagagcaatttaaaaacaggccctccatttgggcttattttgcttgataaagcatttttaagtggcaatattttgtgttaattttttcaaccagctgctcttattatttgattatgcattattcaaagctctcaaaagcgagcttagagcacttgagaaaataacttcagtgttatacgtgcccacacaggggactggctccagctcccagaaagatgttctggatctaagacctgtgctacccggcacagagccactggccacgtgtggctgtccggctcacaacatgacaagctgcagtgacctgcgcccaagtgcgagctccataagccagatcagaggactcagcgcaagcaccacaaaacgtaggctgcccaaggatgatctgtgacactgatcacaaggtgacccagataatattttgaatatgctgggttaactataacatacatttttttttttaagagatgaggtcttgctctgtcgctcaggctggagtgcagtgacaggatctatgttgcccaggctggtctcgaacttctggcctcaagcaatcccaaagtgaagtgctgggattacaggtgtaagccactatgcccagcctataaaatacattcttatgattaatttcgtttgtcccttcttattttttgacgtggctccgctgtaatcccaccacactgccctgaaactgtccttcggcttccacactccccatggggcctgggtcttgggaggcaggaaatgtgtcttcatcttaatatgtttccagctcctggttccaagcctgacacacagagagtgtttaggaaccagctgacgatggaatgaacgatgatcgtgtgaatgaatgaaagcacacaggcactcacacggtgcccctcgctggtgtcctaaaaccacatttgcaggttccctgggagacaagctgcatctgtgagccagtctttgactttccccaaacagctgcagagtgtctggggtctgggcagtcagcggagtcctttagacattcaaggtgaccttcatgttgggcatctggctatgggcccaaagcaaagaacaggtgcgttctgctccaaatgtcccttccttctcctcactcctgtgcctggtgatatggtctggctgtgtccccacccaaatctcatcttgaactgtagttcccataatccccatgtgctgtgggagggacctggaaggaggtcattgaatcatggaggcggtgaccctcgtatcgctcataccattctcatgatagtgagtgagttctcacgagatctgatggttttataaggggctttcctccttttgctctgcccttcttgctgctgccatgtgaagaaaagcgtgtttgcttccccttccaccatgactataagtttcctggggcctccccagtccggtggaactgagtcaactaaacctctttcctttacaattcaagcaatctttaaactgtaatactaatagacctggcttctgattagaccatttccccagctccagctttgaaaattcacaactacattacctccccaagtaggatccaggtaagaaatggcatgcgcttgtgtcttgtaaattgccataatggctaaatatccacaccaagtccacagagaaaggataggaaatcttgcctttcagtgaaaggaggagggggaaaaacaacataaaaaatttattaaacttgagccactgggaccaaattgcaagttaaagattcaaatgcattccccttccttagaactgatgatttacgtttgcaataactgcagtcataaagagctcgttggattaaggaggctcagtcttaatgtcagggaataacattattggacagtgcaaagccacaggttccccagagctgcttttctgggtgagaggaattccaccttgcattttggttcaagagatcagtcacaatcaggacgggcagagaaagatggaaaatgggcaactggccgggcacggtggctcacgcctgtaatctcagcactatgggaggccgaggcaggtggatcacctgaggtcaggagcccaagaccagcctggccaacacggtgaaaccttgtctctactaaaaatacaaaaattagccgggcgtggtggtgcatgcctgtaatcccagctactggggaggctgaggcaggaaaatcacttgaaccctggaggtggaggttgcagtgagctgagatcgcgccactgcactccagcctgggtgacaagagcaaaactccatctcaaaaaaagaaaaaaaaaaaatgaaaaagaaaatgggcaacctgggatctagcctgactctccaggcagaaatcctctaaactgaatgtgcactataaaccagcaggggcaggcctggccatgtgggggctgtagttcaggaagtgtcctgggctgaacacccaggaggctcctacggagtgggcatttcatgtcagtccctggccacataaggccgatgtgggccccatcgtcccggagccctcctgtgctgactgtccagaaacgctgaggcatgtttctggagagcacagaatcccaacctcaggctggtaacttaggagaaatagcaggtcagaaacttgccctcacaccggccaggagctccccaggctctggggggcacaggctctgtgtggtggggggctagggttaaatcatggctctgccacttactagctgggtgacatgggccagtggtgtcccctctctggacctcagtttccttatctgtaaaatgaggacaaccacagaacagacctcacagagcaattgagggtgggggatttgagggaatgaagcccagcagtgcccagccccaaaaaagctcgtaagcaccgcccactgttgctgtcattgtcctgtgggtacaggcatcctaccatgtgcagaaggcttgccctgctagggctggaccaggagaggacaggaagaaggtgcagggtctgaccctctgataggcaggggacaggcatttaaccccctaatcaccgtgcaccccttgggcagcccagagacccaacagaggcatgggtgctgagggggcgctggccaggatggagcagcttcacacagtgggagacaccttggcctggatgtggcagagaaggatttccaaggcaaggaatgccaggaagggtacaggggggtatgttccaactctgagcatagcaagtagggtggctgcagactctgctgggggttggggccttatccctaagggacttccctctggccatgccaccagccagaagccctgccctctctgagcctcagtttcctccccccttacagggttgagatggacagtccctcagtcagtctcagaagcctgcatgctggagtgagctgtttttggaattttcttttttttttttaccccagacggagtttcactcttgtcgcccaggctggagtgcagtggcgcaatcttggctcactgtaacctccgcctcctgagttcaagtgattctcctgcctcagcctcccaagtagctgggattacaggtgcccaccattacatctggctaatttttgtatttttagtagagacagggtttcaccatgttggccagactggtctccgactcctgacctcaggtgatccgcccgcctcagcctccccaaaaaatgctgggattccaggagtgagcagtttttttttgaatttttgaagtctccctcagattcctgaggctggtcagggtggacagtggcctccaggtgggcgccccaggcctggctgtgacctgcatggcccctgtgcccatctctcccctttaagatgctctacaaccctcagacccacgtggggccgaccggatgtccagaggagctctgggagtctggccagtgggatttgccaaggaccccgtggccagcccagcatcaaagggatgggctggtggcagctactccagctggtgggtgaggaatttctttcacagaagtgcatgagactgggccgccagcgtggtgccacatgctgatatggggatgacttgaattgtgtatatacacagggatcctgcggaaagtattttcctgggccctgcaagctaaaggcagccctggatgtgggctgagcagtaagacagggacagccccagcatacacagcaggcactcccatacacgcagctccccctcttactcctctcccggttgtcattctcagtctgtgctctaaaacgaagggagagagaaacactaagagtcttccagaagaaaccgtagttgagctaagaacacacaagctgctgtcaaacagctccagaggcccccaggcagcaaggatgcccgaaggcaccatctcccggtggcctgggagggtggtggatgagccaggccgtgaggccccagcaaggatgctcggtctcagcccaggtccctcacctgcaggtgaggccccttcctcctaccctcctacctccctcctcctggagcgggccacgtgatcccaccctggtcacagattcccacggtcccgatggggccctggtgctgtggccaggcttgggcagcgcctgggtggagcagaggcctctcagagagaggaatgaggtggacacggagaagagcagaggcgggtccaccgaggcagggcagtgcctgccgggccacgtgttaaccccgagcccacacactcctgtgccctgaacctgcgctccaggcagcaccgctccctcctcacaacacggcatcccaggacccggcttggggagcatggccagccccctctctgccccacagcttcgcagagacaagccctcatggaggaccctgctagggcaatgggccaacacccgggccagccattagactggctgggcagccttctagaatgtacaagggatatgaagatctgctcatgtctgaggtctctcagatgcatgccttcccactcagcacggaagcccacaccatgacccatcatgaggagatgccccggtgggaagggccagggccagctctgcctgcactgtggccgccatgtttcctcctgactccctggacaccaccaggaacctccctgcccctccctcctctccatccctcctcccatccccccgccttactcggccagctcctccaggctgcggtagacgtcatcgtcattctctgtggtctcctctgagggaaaaggcctgcggaagagaaggcgagagggaggtgagcaggtcccggcactgccggccagtgggaccccagctggaccccacagcagagcccagtgtggcccagccaggagcaaaggggctcttgtccactctctggaaggacacagggtgcgcggacactgatcggagtcacaggacgagccaactgggccatagggcaagaggagacccatgcctacttgccagggggcaaggaatgtgtcacgcccactccgggctccgggtgtccagtgggaagacgagaggcccaggtcagggctgcagaaagcgttcatctgctgggcgacctgccttcccctttacccaccctcccacttccagggggttcacagtggagatgaggctcctcgcacacctcctggtgggcaggtgggagggctgccagctcagtccacgcaggagaggaagcaggaggggactccggaagggaggggtgacttctgaggcactgagggtaggggctcacccacgccacccaccagccactggcttgaggtcaggaagagagtcccgaaaatgaaaagccctcggaccttccgcctggatccacagcctcccctcctacaaagggagcagaagccccatggggtctccccagaaggaacgcggcggtgctcccccacactccgccctccagatgccccaaccctggtgcctttctgcagttcacgatggtatagaaatatatatatatatataacacataaactttaatcatctgggctcttcttgagtctcatttttgtggaactgtcatgcatatgtacataattataattgtttttctcctgctcatctgtcttatgtcaatttaattcataaaccagctcaagaacctggaggggtggaaggaagcgctttttcctcccccaggacccaaaacatcactctgctccatcctctgcagacagacagatgggtgtggccccgagtctacaggcctccctgcataaggcgagcccaggccagcacaggccaaccactcagagctgaaatgtcaggtcagcctcaggaagcggggagaggcggaagggagggaggggtggggagggaggagaggcaggagaggcagatcaaacacccagaagagggggctgcagctggctcaacgctatgggccaaatccactcatctctagaggagacacgaaaggccccttaattaaaccaaacagccccctgtagccccagggtgcgtgttctggtaggaaacctgtcactaaggatgggacgggagatcccagctggaggggctgcccgggcccagatgccagctgggattgcttccttgcctggggtcaggctgacatttgctcagcccgagatccagcagggacgcgcggtccgtcccggcagccccgccccaaccggaggccggggacctgtgctcctgcgggagggcaggggggagtccgctgatctgtgagctggaaacctgggtcctacctggctctgtcacagacctgcagggactgggccattggtcagcgtgcccctgtggcttcctggtaaaagcccgtgtccaagggcgcagcacggccaggcctgacctctgcatgggtgagctcagctctctcctcccagccactctccctccttccacccatcaccatacagcagcatcccccagttgaggtgtgtgtccctgggtcacaggcagagctgaggctgccacgacatcctcaccatcagggctccgttgctgagacagtgccatttacggccaagaagcccctcaaggaatccatctcctcccatgatatgcagagccccatgccgacacagatcccgcccaggtgatgggggtggggctgaggagccacaacctggaggggactggcccacacgcaggtgaccccagaaagcacaggagcacgtggggggccaggagccagggaggctctgccaggctgagatgtgacttcaggacccagagatggaggcttgaaaccccgctgccaggaccagccctgggctgtccccgctcccgcaccagcccctcgcttacatgcagccatccctgtctccaacctcgtcagtcatttctgctttttctaaattttcagtgatgattggtatgacttccataataaagaaaaatagaatcaaaattctcattatgaaaatgtgtcctcatcaaaagtaaaaaaattttaaaccccactcatctcctataaaagtatgttacatataaaatgacatcatggcaaagtattaatgtgctttctcacgtagaatgtagagagggaagagaaaataccaaactcctgaggttgtgatcttgttcaaatctgatcacagagtgtgggcgacagtttagggaaacagggcatcccatcgaaccctggattatcaacaggacggccattcggggactgtacttctagaacccgccctgctaagccgatcaagagatgcattcacactttgtaaggaaacccaccctaatggtgagtgagcacacacgcgtgcctctcactcttcctgtgcccaggcagacatcactcaccaatcaaagctctcctatccctgaagcccagcgcagggttcttaacacagggctctactcctccatcagtcctgggactcagacagaacccacctgccctgccaggagagctgagcccggggcagcgaaggagaggaaaggctttggagttgggcaaacccaggtgtgaaccctaggcccacagcctgctccctgtgactttggacaacctacttaacctctctgagtgtcagccttctcctcctggaaaatggaagtaatagtgccttctcagaggtctgctgggaagagcagctgtaggatagcagaatgctctgtacttaggggggcccaacagtggcagctgcgatttagtatttctagtatcattctcactcagggcactttccactgcccaagaaaactgccttctgatgcctcgttagggcctaagagccccactcgccatgatgattttggaatcttgtttcctaacacagaaagtgagtgcccactaaaataaggcacaacagtcatttcaaaaccttttgtcggccaggcgcggtggctcacacctgtaatcccaggactttgggaggcccgaggcgggcggatcacctgaggtcagaagttcgagaccaacctgaccaatacggtgaaaccccgtctctactaaaaatacaaaaaaattagccgggcgcggtggtgggcgcctgtaatcccagctactcgggaagctgaggcaggagaattgcttgaacccgggaggcggaggttgctgtgagccaagatcgtgccatttcactccagcctgggtcacagagtgagactccatctcaaaaaaaataaattaaaaaaaaaaaaaaaacctttttaaaaacctgaccttgagctatgattgtcgtaattttccctttcctgcatctcatttggtgtcttgttcaacccctactgtcatttcctttacctgcccaacccagaggagataaagcaggaatgttaaagtccaaagaattatactgctgcccgtaaaatctttactacttttattctaagatccctatttgaggccacaaatccccttgagaatggagctgcaaatccaattaatttctgccacagcccaacaaaagctctgccagaaggggaagagcaggagagggaggcagcctgtcagggaccgtgcacggcctcagcgcctggccgctggcgcaggaatatgcaggagaatagaggaggcttcaccaggccccagtcccctttcactccgctccccccacagccctccatgcccatgctacctctggcctttgtacctgctctgctctctgcctttagtcccccaccctcccaccattcacccaagtgctagcatccttcagggctgaatccaagccctactgcatgtgggaagacttgatcagtctctcagcttgggtctgcctctgcctagcacagtgcctggcgctagaaaggcatggatgagtacatggatggatgagtaggtggaggatagatggcggggggtggatggttggctggctggctgagtgggtgcatggatgtgtggatggatgaatggatgggtgggtaagtaggtgggtgggtgggtgggtggatgggtggatggatggatgggtgggtaagtgggtgggtgggtgggtagatggatggatgcatgcatgcatgcatgggtgggcgggtgggtgggtggctagatggatgaatgggtgggtggatggatggatgtatgggtgtatgggtaagtgggtaggtgaatgtatagatggatggatgggtggatggaaggacgaatggatggctgagtggctagctgggtgggtgggtggattgatggatgggtgggtggatgaatgggtgggtggatgaatggatgggtggatggagggataaatggatggctgagtgcatgagtgggtgggtagatggatgaatggataggttggtgagtgggttggtggatggatgaatgggtgggtgggtgggtggatggatagatgggtgggtgggtggatggatgaatgaatggatgtatggatgggtgggtggatgaatggatggatggggtgggtgggtaggtgggtgggtggatggatggatgaatggatggatgggtgggtagatggatggatgggtgggtaggtgggtggatggatgaaaagatgcatgaatggatggatgggcgagtggttggatgaatggctaggtgggtgcatggatggatggatggatgggtagctagatgggtaaatggctgggttggtgggatgggtggatgagtggtagatgggtgggtgggtaagtaggtaagtggaaggatagataaatgggttgtcgggtggctggattcatgggtgcatggatgcatgtctggaaggacagatggatgagagagtagttggactttgtgggctgacagacagatggatgagtggatggatgaacaaatgagtgggttggtgggtgggattagtgggtgcatggataagtggacagaaaggtgggtgtcagatattctcaggctgctcttaatcccctgaaatggcagcctcaaattagatacgaggaagtttttttttttttttttgagacggagtctcacactgtcacccgggctggagtgcaatggcatgatctcggctcactgcaacctctgcctcccgggttcaagtgattcccctgtctcagcctccaagtagctgggattacaggcgcccaccccgacgtccagctaattttttgtatttttagtagagacagggtttcactatggtggccatgctggtctcaaactcctgacctcgtgatccgcccgcctcagcctcccaaagtgctgggattacaggcgtgagccaccatgcccagcctacacgaggaggcattttcaaggagagcttgtaagagatcacacagaggtatttaagtcacccctcagtagggactttgtaaacactgacctcgattaaacagtgtgacacacatttgcacagagaatgtctgagcagagttcctggggccacatcccagctgtaacttaaagcccagtgggggtgggttgggtggagactctggtcattttgcaacaaggcctagctccaccccccactccccgcccccgaggccatcttcaggcaccagctgattttccttcccgcacttacccctagcgtcccctacccacaccttgccctgtggcgttgccttgctcgttaagagcagggaatgagaagcagagaaggccaaccacagcctatccagaagttgtcctgagagcagtcatcctggctccccaggggcggctgcatccctctcctcccaccagagccttcctgagcatgcatttcctcgtgcccggcttcgggaagcagagtttcccactgcaccgccgaggggacgaagcagatgtccgcacaggaagcagagaagccccaagtgctgagtgcagagaaatccccagcagagcccgcgttgggcagcagcccctcctcccaaacgacccatccaatcccactccccaagcttcctcagcacccactccccactcctgcccctgagccactgcttgctcaaggagctcccccagcccccaacaggccttccccatgagctcaattctgggcaggacaatcacagtcccagtgctacagccaaataagtcaccagccagaggacacagaccagaaaacagaacaccctacaggggtgcccaaacccaaaccccgaaggaagagcagaggaaacacagctcctgcttccaaagagctccttcactctcctcccgtccttccccggggaattacggggcacctgcgtggggctggcatgggcggccatttgtcactgattcagggagaaggaacagcttgaatctcgctttgggataataaatcaggctcctatccttgccctcaggacttctgtgaaaatctgctagaaacgatggcgtctgcagggcaccacctgtgccactcactgtgcctacagctgcatggtggccccacagtccagagggaggggcacattggacgcgcaggggtctccaagctgagggtagcaagcacaggtctgtcagtgcagaccctcaggatctcagctagagggacgacagcttgggtttgctttcttggagggccctgaggagccggcagccagatttggtttttaagacaaagaccagagtagcaaagagaggaccctaaacacagctgccctccttcccaggcaggtagcaggtgcctgggttctaggggacgagcccggacagctcacgccttactgtgcttccatgaggactgtggggcctcaaacgtggggttcaatggggagcacgaccgcttgttggtgctgatctaagatttcacaacagcagcagctacagggagagaaggctgggcccccacaccaccaccgccccaggatctggccaagtgcttcaaaaccatctcggatgcagcactgggcctggtgaccccatgtggcagcgaactcctctgcatattgagtggactccagggctccatcatgcagagctcgtggccactcctgcagccctggagtcctggccctgtttccctggggacaaccaccacctcagagcagggaagcccctcttgcctcttaaagagtgaatccacccagcaggtatgcagctcgtcctggagtgagtgtccacaaacagccctgcccagggccaacatgcagctcccaggctccgtccccaaacacccagagataacatcagggagaagccacagaacagaccccagcacctcaactgtgctcactggaggggagaccttgtggggagagctaagagcaaggcttctgcaggtaatgggtctgggttcaagccctggctctgcctgtctctgagcctcagtttccccaactgcagaatgggggccggtagtagcaattgctaagaccaagggagatggtgcataagcctcctagtgagcatcctgcatgtgccagcgtgggtctctccccttccgctttccaccagctcagcctgagcccactctgcctccagagccagccgcagtgggaccaattcctggatcacaattggaaaagcgcccctccccacagatggtccacccggccctgccatggctcaggcagggcaccccactgagcacttcctcccacagtacatctgaacaagaacgcagccctcaatgaacatttggattctggaaggtactgacgattgcagaaggtacagaaatcagtgcttggctcatccagccatcatgcacagagtctaggacagtttttgtttcccacactctgctggcatctcaggtgaaggatccagggcttgagacagtccctaatgcctccacttggccggtacagaaagaaagtggaacccgactcacagaagagaaggccccgcacggtgactgccaaggaccgtgttcaccagcagtgtatcagggaggctgctccacgtgaccctggtgctcctcgcccagccggagcactccgagagaacaggcagagcctcgagttacatcctggagggcgggactggctcacggccctaagggagcgccctcggcctctgaggccaggtgcggccagccctgacatctactgtccgggtttgcccaggacagggatttcttgggatgcgggacttttgatgctgtaactgggacaagttggccaccctagtcttgcagatggcagacaacagtgtttccatttatggtgctgacactatcggggggtggtgggggcctggctaagcctcagtttccaattctgaaaccagcttcaaaatcaggctttgggagggccaggtgctggcctggtactggaacaccaccaggtgcagtggcatctcacccaggcggaggccatagtgaggagaaagagaacagcgcgggcagaggggtggaggggccatgggaccccacgcccagggcatgggagccgggccctagcccttttggcactgtgtgccggggaaacagcagccaggcaaacttgaaaggcaccatcaggaagcgcagcgtggagggcccgccagacccgtttaattattgagggagtcacctgggtgccgccttctaattggcagggaggccttgaagcaccagggcttcgcttattagaaacggttctcctgctaaacagctccaactgtcaaaacaagcccagggatcacgtttctttcctcagcgcgccatcccacccagcccagcagggctatcacaatgggaggaggccaggtcgaacccggctttccacccatggccacacccggctcggggatggcagtgtcggagatgagcctgacacacccagcacgaaggcagcacagggccgaggggtgcagggagcacgcagagacagctcggggtggcagggagtctgaacctggggaaaccaggaagggcttctcgcaggtggcggcaagggagctggtgtgaagagtaaagtctaattttgagttcagagctctgactttgtttgggtttttttggtatttttttgtagagatggggtcttgctatactgtccaggctggtctcaaactcttggcctcacgcgatcctcccaccttggcctcccagtgttgggattacaggtgggaggcactgtacctggcccagagttccagctttgtataagacaggctagagtaggaaccctggccacaaactcctagctacaggcttgctaagggccctacaccccctggcctcagctcactcactgtaatatttggacaagccacctgcctcagatgtggtatgtgaaggaaggagggggaaggtgatgatggacatgggcatggtttaggggctggagcaggcagcccgggcagggggtagatgaagactcaagtgccaagtggggcaggagtctcacgggggtggagtcgagagtgaccaatgggctggcccggtgtggccaccagggtctgaaaccaaagtcaggatggaagtaggagggtctctgtcccatggagtggcgggttggaaggtgggggcactgaggcacaaccactgccatagccccggcagtgaccttgacatctgccatggcaggtccagcgaggtgggggtgtggccagctccaaggccaccaggggagatggtgaatacaccagagccccagaggagagaccccacgtgacccccaatccagcgaggctgtttctgcccctgtttccagaacctcggcaaggcagaggaagacacggatctcacaggcggaaagaaatgctcggtcccctgccccctctactttgtctgggagaggaaggggcctggcgtggctgctgattacagaggaatgtgacttctcagcagctgtaaggcataatatatatttttattttccaacacgcttctcgtaagggaacctcggctggcaccggtttggaaggaaatggccagtggtccacagggtgtccttccccggtgagcatgcagagcccccgaagctactctgcctttcactccatgccagccctcttcccagggaacacctgcccaggcttggcaggaaaccccctggacaaacacttaggatttgtccatcagagaacggggctgagggaggaggctctaggacaggggcgttgcggcccacaggccagcaggggctttccagggctgaggcctgcacccccagtccctggcacggctgctccacccagctgccaggtcaggcctctgtgcatctcacttctgcaaacccaaagctacacacactccctgcagacacaggacagggatcaggatgcttccaaactgggcactgatgggccagagcccccagctgtcctctggccttggcctggggaccctcggccgagctcagtcatgctgggcagagaaaggtggacagagtgactaatgaggactatggcacaggaacgcagacacgacaggtctgattcacgaggaggaaactgaggcaaggcttgggtctgcccaagcttccagactccaggcctgcaggtcagcactctctgtgcccgacggtgcccatgagggccccagacagctcccgggttcctcagcagccccaaccaggacagctctgagatcctcctgtgaacatggaacgctctgtcagctactggaaacaccgttccttttttttacctctccctgaacacagcagtttccttccctgggccagtggaggtctgttgcaggagggcagcacacaaacggcttcctgagcttcccccgctctcgcgtctggcacagtcgccggatcacacaagccaggctgggcagttttgggtgggcggacatgggccacagcggcttgtctgcacgtgtgtcccaccctggccagaggcagaagcgtggacgcgctgggccaggccggggactgaatccacgggctggatggcaggggctctggtctgagacccaggaggaacagcccgcatggcacgcccaaggcaacaagtttaaaatgcagaccttcctccagcaaacactcggaagctgggagctgcaggcaggatccctactcggagagctggggtgggagggccagaatggggggccgcactgggggttctctgcaaccaccaatctgctgtgtcacctcaggcgagatctctctcctctctaggctgccaagggggactgggtgacgcagcagctgaaggccctcttccccctccctgcacttcctgccgacttgtctgctgggaaatgaagggtcagctgggtggccgaggccttggcagtctccctagtgtgacggggcctcacgttggaggatcggctgtgacagggacagcaaccccagggcctgtctaggagcagccactacccttccatcccctgcccatggcaggcatcactagtcaatcacagtattctctctgagtccactgggatggacacactccaggtggctgatggatttatcagccctggtgagacagggatgccagtcccagcagagagcaggtttccaggagagccctggtcaaccctccattgtggcatcaattgaccgaggtggggccagtctcaggagtcccaggacagcctggtcaagctgctccacagacaccagcctctgtccattggtggagtcttggagcagggttgggggcacacccacccagctgaaagggcacagtggggccccaatctttcctctacattcacagagcaggggaaagggaaggcctcacaggacggaagctgtgctgaagctcccgatagccccacaagatggggttccgtctccatcccaaagaagacactgaggcccagagaggtgaagaaagctgcccaaggaggccagccagaaagtggcagaggtgggctgggagccaggacctcacaccacctggccatgcctcggagagcagccctgggtcatcgcaagggactgaccacaccaaagggcctgggtgtcacccctggcacctcctgtcggcacctcctgttggctaccagccccgctcaccctcttcctgctatcccgacccacaaccctccgccactcccacctgggcgtccacagcagcccctcggtggccctggcctccactctggagccccttgaggccaggcagggccagaggaagggtctggacaaaatctcagaggccactgccctgctggaacccccagggctcccctcacacgttgctccctcccctgtccagccctgtccctggctgccctggccccggccgctctctatccagggccgccaagcagttccccagggcttctgcctgggcctccctgtcccagacctccccatggccatcagggcccagccagggcatggcctcctcagtgaggcgcacagaccactgcatctgagggttcccacctcaccccatccctctgctgccaccctgagaccgtgtcccgggaactctgggccttggaggggctgcacacagtaggtgaacatgactggccgacgggcggcagggatgagagggagcgacttgtccgccccagtgatcgggtcaccaggccactgggcaggggctcccagcaagcgtgaagatgaggatggagccccactctcccacagtaaccccgaggggatgggcttggctgggctcctttgcagcagagaactgggctttgaccctgtgggtggtgccagccgtgggcctgaaggcggccctgggtgggatggggctgggcgagggccagctgtccaggcccccaactacccaccttggagcctcaggcctacagccttaagttccaatcagaactggccatgcctcacctctgccttcctgggatacctgttccatccaaaccctccctgctcccaaaatgccagatccccaacctggagcgacgtgcagggttcccatcctgcagctgccccctcccaccaagtgggtgctcagggaagggaggatccaagaacaaaattctccaaatagcagaaaacccaggaccccgcagccaccaaccctagccgggaccttgcaccgcgcctcagcgtgagcagccccacctccgggagggctgaaacctcggtgctggacaggggttgaggcctgcctcagtctccccaccagcaaccctaaaggggcagtggagcctctcctgtccccagggtcagcagatgacgcatgaggctggttttctcagctgtcagaggccagtcctaccaagaaccgaacgggaagagcccggacaccctgggccaggggctccatgcctagatgaatactgggcccggaaccctggccccctgactcccaggcagaccccacttgaggacgtcagataaagttccagccccacgctgcccaacgggttggccctgggctacaggtgacctctctgagcctcaacttcctcctctgcaaaatgggggcgaaaatctctgactcccaggatcaaggggaacatttaatgagctgacgcctgggaggtgctcagccctgtgcacgcctggtcgtggctgctatgatggtgggtggacggggcagctccagaagggccacagtgacagatgggacacagagtggcttgccaaaaaccgtgctgatcactaacagggagggaaagaagcaagtccaagagtccacttcaacagcaatgggtctcctcatgtaaagatccaaaacaatgggccagacgcggtagctcacgcctgtaatcccagcactttgggaggccgagacgggcggatcacgaggtcaggagatcgagaccatcctggctaccacggtgaaaccccgtctctactaaaaatacaaaaaaaaatcagctgggtgtagtggcgggcgcctgtagttccagctactcgggaggctgaggcaggagaatggcgtgaacccaggaggcggagcttgcagtgagccgagatcgcgccattgcactccagcctgggcgactgagtgagactccgtctcaaaaaaaaaaaaaaaaaaaaaaaaatccaaagcaatgaagatgaaacgaaacagtatttgaattttgataaaagggtaaaccccaaatttaggatggtggttacttcctggcaggcgctggagtagacgcagctcctttgtgtcctaagagttagaaacttccaagtttcttgttcttgggttgactggccagcttgtgagtgttcaaagtaattacaagttaaattaatgcatcaataaagataatagggaaagagcggaacaaaaggctggagaaagcaaccagcaagggcaccagatggccgatcccagggttccttcctctcttgtcgaaacgccgctaagcgctgccttcaaaaccaggccatgtgctggcaggcacgggcccctgggaacatgcctcacgtggagccgggcatctttggggaaagaaagccatgggctgggggtgaggcagacagctctgggcccaggcaggctcctgcgtcgttcaggctcccctgaactcctggcagcccatcccatggcagcctggcaccggctgtgcagtcacccaggcccgtgtttgggtttgtttccaccacaacctgaatgtatgaccacagtcccccaagacaccaccatgccaagacgtcatcttctgttccgggacattcttaatgatctcacgtctcatctgcttatgtataaatcccaccacaaaacatgatgtgtcttttcttctcagtctctgaaaatgagccgataatgttacccagctgcgcagatacatttttaatgctgacagttgctgaagaggcggccttggtttgttttgcttgttacagagtaaaaccatcttcgctccctaaagggaaggacaggagttggaaagggcttcacctcatgccaatgagcaggcacgggacattcctcccgccccgaacgcaccatgctattatacttgggacagggcactgggaaggaggaggccactgaccccgaaggctcacccctcatccctgctacctggaggggtgtccttgaaccccaaacctcccccaccagctgcgggcctcctcctgggccgggagttctcgtggatgccagggctacgttaagaagcactggttagggctcgtgaggatgctggtccggcctccagggagtgcaggcctccaccccacaggcaggctaggctgaggaggcgtggctgagggaccccctcctggaccctgcgtcccagagctggctgtgaagtgaaacccatgtccctgctgtgtttgtgtcctggggctgcgtaaccaagcaccatcgaatgggggcttaaaacaacagaaatttcttctctccagttctcccagttctggaggccagaagcctgagatccaggtgctgcagagctgtgctccctctggaggcactgggggagggtccttcctgcctcttccagctcaggtgggctccatgtgtttcctggcttatggctacatcattctaacctctgcctccctcttcacacgatcctctcctcttctccctgtgtctctcctctgcgtggttcttataaggacacttgtcattggatttagggcccaaccaggtaattcaggatgatctcatctagaggaccctactttaattacatttgcaaagactcctttatccaatacagtcccattcacaagttcggagggatacagcttttggggaacaccattcaccccatacacccccttctctcaggcttgtctgggatctagatggaaagccaggggacccggatgcatggtcctcaggccttactttgagaaccacctcttgcggctgtgcctcactggttgggtccctcaccaccagctctgcccatcaggcccacatgggcctccatttgtagatgagggaacaagctcagggctaaggaacctggtgagggtcacaccaggagcaaggatcccagccgggcctcgaacccaagtctctcaacctcaggccaggcccttaaccctgagcctccgggtctgggacccaccacgccctaccctgctctgccctgacccaggtacagctgcagtgtgttcacctgcacgtgaccagtggcccggtgtccactccccacatgaccaggcacatcccaaggctggccagctcctgctatgtcccagcacctggccccgggcccagcagaacaaggcaccaatagaatgaggaacgaatgagggaatgagggaacaaacaaataaagaaacaaatggacggctatggactccttgggctgagtatcaacatcatgagacctcaggaaagtgatgctttctgggcctcagtttccccatctgtaacgggagggaatgaaagatccttctggtatgaatgtgccaggctctaggagctgaacacagcctctgaaatgtgagccagcagggccccgtgagcccactggggtcacctggagacacctgccaggtcccaggacttgccctgaatccctttgtcttcccatctcactgccctgatgtgcctcagcccaggaggaagctcacaccctcaggctcttcctcaaacagagggttctctcatcttgacacaagtgacatttgtccacgaggatcagccaatggtgggcagggtaccaccctgctgtcgactggcacacctaggatgtcctcccccatcatggtgccatgaagaacaagcccaaattccaggcatctgagctgcccgagtaggcctagggcaggtgtgatgctctggagctgaaaactggagcagacacacaactgctgaggcacatttttctccagcatcttctaaaaccactttcatggacagtcatgcccctggggctctgcgggctttaggggattcctgagttccgctgcagatggtgccacatggcctccaccacgcactcaggagacaactttgcagccatgtgtcgcatggaaagtctggtcacacgacctcctttaacccttgcagccttccaggtgggtgccgggagatccccatttgcagaggaggaacctgaggcacagagtggcagctcctcctcctcctcctgactctcagcttttggacccactgtgtgccaggcactatactgagaactttacagacatcatcttttgaatcctcataacaatccagtaactccaaagggccggtgaggacactgaggttcagggtgtaagaaattgatccagcatctcatcagcacccgagtgaaccaagtcagctcattcatccacccacatcatattgttctgtgcctactatgtgcctgggagcagatgggtcctaacctcacaacagaggttgcagccttaatgattctagagtaccacactgagaccaatcgcgttatattcatgtgaaatagggcagagcgaaatggacagaagggtggatggatggatggatggatggatggatggatgagtggataaatgaatggatgaatagatgggtgaatgaatgggtggatgggtatattgggtggatgcatggatgggtgggtaaataaatggatgggtgaataaatggatggatggatggatggatggatggatggatgcacaaatgggtggatggatggatggataggtgggtgaataaatggatggatgcatggatggatggatggatgggtggatggatggatggatggatggatggatggatggatggatacatggatgtatggatggaaggatggatgaatggatggacagatggatacatggatggatggatgtgtggtggaaggatgtatggatggatggatgtatggatggatggataaatgagtgacagacgggctgatgagtggacagatggacaaactgaagaatggatgggtggatgggtggcttgatgggttgtagggtgcttgaatgatgggtgggtgggtagatgtagcgatgaggggacggatggacagactgatgaatagacagggagatgggtggcttggtgggtgcgtggatgggttgtagggtacctggatgggtggaaggatgaaagaatggacaggcagatgggtagatatatacgtggatagatgatgaatgaatggtagatgggtagataagtgagtagacagaagaataaaaagaaggaaggaaagaaggcagagcagaagggtggggggagtgcggggatgggaaggagggagtgagaggagaaaagcaataataaaatccattagatgagccagagaagtattctcagtgggcaaattggcagctcagcaagttcatctgacaatggctgtgatgatccgggagtggagcaaagagagaaactcagctgcattttgtcttttaaagacagacacaggcagatccctgccccactgcagaagctcaggctggctgttcacgcccccctgccaggctgccagccctgcttctcctgaccgtctccagcaagagggagctcatctacaccagccacgcagtaaacagccagttactgtatttctgaacaaatgtgtctcctttacaccatcatcctcatggtggcagccgcaaagaggacacaccagtgttccctagccctgccactcggctaggggtgcagggtgggggcacagcccctgctgacccattgggccccccctgccatttctgtgctacacatagactcaccccaggttgcactggccaatgtgcaccatgcacttcccgtgtgccaggcccagagagtcacccgattctctcactcagtccttatgaaaaccccacacacaagatgccatagtcaccctattcacagacgacatcccaggtctaggaggtggcaagactggattccagccgccagccactcggctgtcaggtaaaagccgtggcaggcccaggacagcaggaagaggttcaaagccttctccgtggggccaggtgcacactcctggtggccagtgggccaggttgtggctttagcacagcaaaggtcagtgttctgctgcccctgcagatgtggcctccctctaccccagggccactcattccttcccaagtgtgggtctccagtcagcaagcatggggagagggtcctcggccaagagagggtggaaggcttggtacagagctgcccccaggctgagcagcagcactggacactaggccaggtctagtgcatggaaaaggaatccctcaggcactggggaggccctgccccagcggcctctgctgacgcttgcttgtcccctctctgcaccatgagtcccacccaccagtggcaactcccacaggtgtggcaggttccatctgacaagcacccaaaaggctagagcggggcagggaacggccaagcggagtctgcatcaccctgcactacagccaacccacacatgccgcccccctttgctgcaccaaagcgcttccccacccagggccagctctgtcactagccttggctgccacatcagcattggcatccctaaaccaaaagaaaccaagccaggcctgagtgccctgggctctccctccccatgccaacactgcccagacaggacagccgagcaccctcccttcacctgtcctcaccatgaggagcaccagcccttgagaacctgcaaccaagccccagggaggatccaaaacactctgggtgcctgctgctcccgctggcatgatccctacattcagactcaactgtgggagatactgggatacagaatgagcaagatccaggcctgccgggagctcccagtgcagagatgggtgtgggcacatgagcatatatacacacacgtgtgcacacacacacacccatctgcacatacacacacactccatgaacctgcacacctgcacatacacccccatctgcacatgcacacacataccccttgcacctgcacacacacaccccttgcacctgcacacacacatctgcatatgcacacacaccccatgtacctgcacacacacaaatctgcaatgcacacacacacccatgtgcacctgcacacatacatgcactcatctgcacacacacacgcacatacccatatgcacacacacacacccatgtgcacctgcacacacacccccatgtgcacatgtacatacacacacgcgcacacccatacacacgcaccatctaacacagtttgttctgcctaaacttggaggccccagccatggctggacgaatgcaaaagaggagcagtggtgcgaatgaggcagtgaccatgccaggccagagaactggggctgcccactgctactcctcactgagttgcccttggcttgtgctactgaccagggcaacagaggcctggggtgtggaagaggtgccagactgatggagcaagccagctggtgactcgagcctacccttcagagagctggccgctgtgaccagaagcaggctggagggggccagaccccagcctcaaagcccagcaatccaaaggtggcctcttctgacctcccctccccaggaaggagtttaatgtcttccaattactcccctcccactccctatgcagaggaggttgaatccattattgtaacgaaaggaaagaaaaggaaaaaaaagactctccaattaggctggcccagggactcacatgtcatcctgtcccctcacagcagacccactgaggacaggtggccaggatgtttgatgtcaccaggtgggacaattaaacccatcttgctggcgggatgagctgctaagcatataatgactgccaccttccgtccccatctcctctcagcccaattacctggaattaagcaggcaacaccagatgggaaaagggacaccagcccagatggaagaaaaagggacaccagcccggatggaagagagtggagagagcaggggatgctgtgcccaagagagaaggctacaggagccacagcaatgtcttcaaacacagcaaagactcaggggagaagaggccgggactcgtggggcaggacaaggtgttggcgtgcggacccttcaccttggctcacagtgtgcagagaggatagcacattcgttcacggaggtgtgggaactgcagagtctgccaaggcccattcacggagcctccggctgagatgtctcacatgagaggtatttggtaccttgtaggtgatttgggaaggcaaaaccaggtttgggagtggaagtcaaggacgcagccctcaccactgcacaaacagactttctcattatcagggccagccagcaaggcacggggttccagtgctctcccggccactgcaggagcagaggctaaaaggaaagaactcagcaagaggctgtctctgcaagctgcctccgtatcccgggagggcacccggcctctccctgcacgagccgcatcttaggtctcgttgcccagtgctccgggataaagcctgccacccgccaccagctccccccgcacatgggaagaccaaaaggtgggtccttgaagccataaggaaatgcgaggtcactgcttccagttcctaatgctttgtcgtgcttagattcaatacgggtatgtctgatattctgagaattcacttcaaattgaagcaggaagttccagcttacttccatttctctcactccaacctcagcctgacccctgtcccctgccttgcagccgtcacagcaatgctagtcacaggagccaaaaggtggaaacaggccagagttcatcacgtgataaacggatacgcaaaatatggcctagccacacactggaatgttccacggccataaagaggaatgacgcaatgaccggctacggctgggtgaaccttgaaaacaagatgcggggtgggagaagccacgtgcgaaaggcacgcaccgtatgattccatggacatgaaacatccagaacaggcaaacagaaagcaggctgggggctgcctgaggctggggagggcggtgactgctcatggcgaccggtttcttcctggggtgtgaagatgttgtgaaagcagatagaggtggtggttgcacaacatggtgaaagtactaaatgccactgaattgcgtactttacaagggttacatttatgtgatatgaatgtatttcaatttttacaagtcagaaagcagaagagagggtggcagggctgggccaggatgagacaatcaaagccaggagcccagcccagtgaggagccagggttgagccccaaccgggtccccatgctggtatgtgccccccaccgggaccccatgctggtatgtgccccccaccgggaccccatgctggtatgtgccccccactgggaccccatgctgatatgtgcccagacacgccacatagctgggccttcagacagcctcccagccaatccagggggctctgctcctgctctaacaggtcaccagagagttggagagttggtggcttcaagcaacacagactcttacagttcagggggtcagaagtctgaagcgggtcttaggggctggcgtcaaggtatcgaggggctggtccctttcaggaggtgccggggagaatttgtcccttaccttttccagcttccgaagctgcctgcattcctgggcccacagccccatcgctctaactctgccgtcacatctcctttttctgactctgaccttcctgcgtccctcttaaaattatgtgtatttacatctgcgaaaacccttttcctcgtcacactctcagggtttgggggttaggacatccacctagcagccgcgggccttccacaaggaccaggtgctgcgctgcacgatgcacagacacagagcaaccccgcgaggcagagtcatgctcccagcctacagaagagacaaaggttccaagagcatccctgcccaaggtcatttggctgacagaagcttccttcatgggacctgacctcccagcctgaggacacctttcggtttccttctcaggaagtcctacccttcaccatctcctccctcccagccgttcagagctgtgatgaccccaaattagggcacccccaatctggagggctagctctggccacagcaagacccacatccccacacgcctcgctgggtgccttccacaaacccctctcccactctacaaccacaatcctcccccttgccccgcttccccaacacgtttgatcccccagccggcaccagggcgggattcttagattaagtctccaattcatcagcctctgagaagtataattggggcttttatggaaaatcagctcattatgcaaagtgcaagggttgtgaaaatgattttttgaaggagcacgttgggctcctacccagccatgaaatgagggagagattcttcagggctgtgggcttggcttgtgggttttcaagaaggaaagggttgtgttaaactagaaccttttgctaatcactaacactacaaaacgctcgaaatgaaatagtgtcttgtgaagtgctggtggctgcccccagaaggttcaattccccatggaaatcccagcccatccggagcaaggtgggacattgctcagacgcagccaccaagtggggctgcctgggagggttgcctgtcacctgtctcctgagctcccgggtgagcgtgtgaaccagtggaggtctgcgctcaaccccaagggctgcagagggaaaggacccaggaaaagtcccagagtggggctcagaggagggagggtggaggagaagggcaggaaagccaggccccggggaggagggcctgcagaggtcttcctgcaaagcctcgctctgcgcccaggaggcccttccctttggcctgcaaacacctccccttcgtctctcatgtctgcctatcctgtgtgcagaaaggggtaactgagcaggcttggggtgctcaacccctccacatgccgaagacaagactggctcttgctcagctcctaggagatgacctctaacctctaagccccgtagtgtctgccagataggccctccggataagagcgtctttgtatacctgaggcgttgggccacgcagcgtatgctcacaatgtggtttatggtggggctgtgggcatgcaggatcagtgtggcctctgcaggcgctggggatggagtaactaaggtcagcctcacaggcatgcccaaccccaccggccaccagtgaggacccgcactccagggcttgggtggcaatgttctgtggctgttgccacacatgccgactgtcacacaccattgctgggagaactgagcactatgcagaaggctctatggggaggggataaatggaaacccacgcccgatgtatcctggctccaccccggggccttttccatttgttgatttgactctagatctttctctgcaaccataatggcttctcctggtgaatctgagaacctgaggatggtcttggggaccccacacacaccctgctactgtcactgagtgtgtttactgagcccttctctgggccgagccctgagccctgggatttacaggtctcatctcaataaatccgagacgcccccagtgtttatcctcatcttgcagatgtaaaaagggaggctcggggagacatctccggcatgaggtccacagctaagcaggacacagacttcagagctgggtccaccgacatgcagccctggctcgtcacacctccactcgggtctcctgtggggtggcagccttcagggctggggtctacagtcccagtccagggggccactgtgcccacatgctgcctgggcagttccccgacctgagagggaagagggcaggtttccctgtacatctgccagccccaggaccagggccagcaagcagggccaaccgactgctctgcccatcctgggaggagcggcagcgtgaagcaccagcagcatcctcttgggttggctgggtggaggggccagagacgtgggggacggagggggtggcccggagggagggtgcccaccccgggcctcaaagggcctccccattcatcaatcagcaggacacacatgcaggacagatgcagggccagccctttccatggtcctcaccacccccgaagccaccaatgggctcccgttgccacctgtaaaccccaagggaaacaggccctcagagctgcagatggggcacctcagcctcaggagggcagcggcatcgagagcctgacacgggcacagctgggacccaggactgtgatcaaggactgtctgcggcaggagaggggatagggctgtgggcacctgtggcaggaccacgccaatgccaagccgggccaattgcctccccaggaacagaatcaggtcactcgtctgacgtggggtctgcggcaccaggcctccagtttggaagaatgtctaatggatttggagaagagatcaaaagtctagtattttgtgcaggagcaattaaaatgactgattttttgttgcatgaatctctttcctgcctaatatgtaaaaaaaacaaaacaaaacaaaacaaaaaaaaaacaggctggggagtataaccacgccactgacagtactgtattgtcatgggctggtggaaaggagaaggaaccatcatttctggaaacaaaaacaaacaaaaaacacatagtctttgtatccagaaatgatacttttaaaaacaattaaacatgttttaaacggtgcctattacagactttgcaccagctggaaaatagcctatgcacctggcggagggactggtggggcctcagaggcattagttatcctctagaaagtactcagggtgctgggcaccggggttttgactgctattctttatgccccaaatgtgttctaaatattcttttgtatgtgcttaatatttaattttaagagtctatccatggccgggcgaggtggctcacacctgtaatcccagcactttgggaggctgaggtgggcagatcaccagctcaggagatcgagaccatcctggctaacatggtgaaaccctttctctactgaaaatacaaaaaattagccgggcgtggtggtgcgtgcctgtaatcccagctactcaggaggctgaggcaggagaatggtgtgaacccgggagacggaggttgcagtgagccgagatcgcgccactgcactccagcctgagtgacagagtgagactccagctcaaaaaaaaaaaaaagtctatcctatatttcacattttttaaaaacctcaattcaaaggaatttctgtgtcctctgagaatccaacaacggaagtccccgtgggtttaggaacatttacccctgcccagtgcctctgtgaacctgagcaaatggcccccaccaaggggcaactgcgccacccaaaagctccagtaccatcgtcctgggacccctcagcctgtagtcatacacagcatcccccacggatcacatcagggtaaggccccttcccaaagtcagggcaccctcatgatgtcacctgtgcccagatgtgaccccatcctcgctgctctcaggccaggctctctctgccattccagcctctccttctcaccctgctggcccctgtcctcccaagggtctcccagacacacgtccccacccaatcaggaacctggtctccctgacctcaatctgtgggtcagaatccacagtgaccagttctcatctggggctgttctctcctctcacagacgcccaagtgccccatccaagtgtcagaagcaggaggccagatcacaggggtcatgggaccctctgaggctgaattttgcagtccaagcagaataaacggagagtggagaaattccttggcttggcttgtccagtgccctgcacagggacctgcagcccctaagccaggcaagtccaccatgctccggcgccatccctgcaaacagaccccagctacctcattctcggcacagcccccggttctgatgtgtggagagtgcatttaggtaggcaatgatctgtgaaaggattaatttgctgatcttattacctaaatcgaaagagattttgcagccgtcagtaacatgcttgcaagatttccccggtgtgagctgaagcctcccgccccccacaccccttcctgcagccgccaacgggttacgcgacaacacgctgcaaatgcatgataaagacacaggcagagggcatctgcttccaaccccagtatctgtgacaaggcacgctggtgtcgatggagatgaaaggacccggccttggcagcgcactccggagagctcacctgatccctttgttctgcgcgatgctgtgcagggagagcctcgacaccgcggagatgacctgggggagacaagaagagacgctcctgtaatttcacaagaaaccagaaaggcatcacagaactggggacgctgctttgcaggacgtcgagaactgttaactgagcacatcgcatctgggtaagaaacacggcatagcgttttgtaggctagacacttgttttgtatttgctgagcaaaacttgtcatttggatgtgctggtatttgcggggcactgctgcactcccggctcctgtggccatgctgctaacaactcccaagctgcttctcacccagaaagggtctgttttgtcaggggctgccagagggcttcaccgaggccacctttaaagggctcactcatcccatgctgctgttctgcaaggtaccatattactaagtacagctcgtgttcacagtaggtgccaacacatttcagagatgaggaaatgggagcccagagaggtcaagtgacctgcccaaagtcacccagcagccagggcaccacccacatgcaaatatcccagggtgctgcttgcttcccttcaagccctcccttgcatgacatttaaacagatgcctggctccatggagggctcgggatgcagaaggtcaagagctccaggtgcacagtggcatgacgggatctctccttgtctcccctggccggcagactggtcaagaggaaggtttggtgagaagcagtagccgctcctcctccctctgctccccctaaccggcctgccccgtgatgtgggcctcctctggataggcaggacccacctgtctcctggcattgaaagcccaacacagccactccacagatctccaaagggacaggtggctagcaggccggagacagagcaagaggctctgcagatgaatacggggaacccgcggtgggggacagggagctggctggcccaggggcacaggttgtcacacacatgagatgggcgggaagctgtcacaactcacggggtgaatggagctcctgagcgacagactcagtccctgaggaggcaggtgcggcctcgacattgaaatcgcaccaagtacatctgtgagtccatgtgtgtgacagctcgcgtgtgtggtcgtgtgtgcatgttgcttgtgcgtgctacaagtctgtgtgcactgcacggctgcgcagctgtatgtgcatgtgtgtacgtgtgtgtctgggggtgggcaacaagaaaaggcccacgacggccacgtgccgaattcatagacaccctccactgggtgctggcgtcataggaacggagcccagagggcgctctgtgtgccggacaccacaccagggaaccccacgaggccatcctgcgctgcacatttgctagacaggaaaaccgaggatcggtcacttgcccaaagctccccagccagatgcactccccaggcttcccttcagcctgttccgcttccagcagcaattttcaaaaggggaagaggaaagaaaatgaaccatagagacggcgggttcgaccaaggaggcggcggctgagtgctgccttcctgtacgtgctcgtgattcgggaccggcgctcagggaagctggggtcatggaaggacagggtccttctgtgcttcctcacacaagactcgatgggcccattatgcggccagcccagccgcactcccatgctgatgctacaaggggcctttcacaagtaatgaggaacttggctctggagtgtttttggcttttaagagctctaagcatttagggaaaacaaaaatgaaagcaatattgctgtacgtccttacagttatttggaagaatgttagatcccaaagggtttggcaactacagggcacccaagccccctctcacacacctcctgcggcagacgtggctgatcaatccctccgaggagccgggcgcaggcccagagccctcctccgtggagtctaaggaggcaccagcattcggtcagcgctgacacacaagaacctgtttgtcaacctggagtcagcgcaaaggccccaggtcgggtcgtacagatggaaccgggtcgtacagatggaaccggagacagagaggaggcgtggcgggcgagccagccaaggccagaacatggttctcctgcgtccatgcatctgtggcccctgtggacaatttctacagctgctatgaccacagcagcctcagccccaagcttggggcgctttgccccaggatgaacgtgtcacgagcagctgatgaagggctctggagggcctgcagcatcgatggggcagccccttccatgggttcagcatggccagctatgctggaggagccctggccctccatcggcctgaatttcaggcttcctagctggcactggggatggggggaagctcagaagtccaccacggggaaccacactccagtgacccaaaacccagggcaggggctgctggagcagacaccggacccctgagatagccatggggtcagatggggcaaagccggccccatgtgaaacccactggcctgaaaggttaggagcagaagtacctccctgcaggaggagggatgccctacagtagctccccagggcacctctggctgtgcccaccccactcccaggacagacagagagctgggtgtccccaggggcccggctctcaggcaatgatcaaacacctcttagcccacagccccagccgactcttccgatatcgcaaatgtcaaaggatgacattttccctacttttattacctcgtctgttccgagtcccagttaacaaacgaatgaagacgcacagctgcatttcccttcctgcctccctccctctcccgcagacagccgcggggcaggaggaaaggaatgtgtgtgtgctggggacgaggaacagggaggaaagacaagaggaatgatgtgccactcaaaacgaccaggcatgctggggagcccacctgcaccgccagctcccaaagcttcaggcctctgtgccattcaccaacgtccaggcctcaccaggccacgcttggtgagactcactgaggaacgaggtggggactggagagctcagaggacaggctgtggtggttgagtctggatcctggatggcagccctggctccatccccacccaaccatggcctgctctgacctcaggttccaagacaccggcagcccgtcagcctccacacagccacagcacaaccttttaaaggcggcactttaaaagacagaccctaggtcctacccccgccaccccacaggctctggggcctgggaatctgcatttatagttcagggcccatgtggctggatatgcagcccgctggggccctctgtcccctaaggactggccagacgggtaacgccacagactgggtcaaagcctgcgggaagccaggagcacgtcccaattgtccacttgtggactcctcgcagagccagggtccctgaagcccctccacaatggacagggaagcagagggttcaggaaggacacaggaaagggcatgcggtctgtgagctcctccggggtaggaacaaagttggctttgctgaatgatttatctccaatgtcttcaggttgtaggcccatcagctgtaactccacctgagaaacctttagatcacagtgactgtaaatgcaaagctctatgctgcaggttcagcagaggataggaagcctcagtgctcccagagcccaggcaccgaaaactccacgtgatgggtccttccgcaaaaacacttcggcatttttactttactgcaccaagtttccaaactgaggacagaggtgctgtgctcacagtatttgcaacttaaacatccacaatcaaaactcaagacagggccaggaagaaaaaggaaacgtagactgcggattcactgtaggacaatcacccaatcttgcatggccttctggaaagaacccagatgtctagctattcacatgtgacctcatcccagtctccactgccccttctgcactttccctctgcatcttctgcctcacttctttttcacacctcctgtaacttcattcctctgtgctgtattcttagtgacttcctcggttctgtcttctgattcattaattctcccttcggctccacctagactactgtttaagacacatactgagtttttcatttcaacaatctcaattttcattttgagaatttctatttagttcttttctcaaattccatctgttctttttgtcttgcttgtttgctcatcattttctcttcttttcttttgcattctgttccttttttccgagaatagaaattctctctcatcgactgcatctgctagccccctcccacatgctgatttgtttctttttgagcaccagctggctagtctggtaaacatacatatattcacagattatatgtattgtgtataaacacacgtatatattgttctatgctgtaagtgcatcctcagtgggaattgttttccatgggtggagggagcccccaggctctgagagacataactatgagggctctcctggtttcccctggctttcaggccccactccatgcctggtgccaaagcagggtgtatcctgccagagactgtttccctgcccagcctgggatggtcagctgcttctgtgtgccagggtacagctctctggtccccattccatggctctctcagccttcctggctcagctctctgcactgcctccattccatctccctcacctccaccatgatgcaacccccgctgttagggcccaagccctagggtgggcctggttccaggccccccagggggtgggtggggagccaagctggcctggctcctctttctgtctttgacatccctcttggtttctgacaattgaggatttccctttctagttctaagcctagtaatcatgttttagtttgcattatttcatttaaagagggattctacgtgttggggggaggggaggagcccacgctcactggaccactgtgttttgtagaaatccctacgccttctgcagagcaggaactcacaagaacctccaagcaaaacagccgtcaaatcaccatgagcctgcagcccatcggtgggagtgaggacacgcctactcaacatcagtcagtgtgggggcaactgcgctgcgatgattttaaagaggagcctggccaggcgcggtggctcacgcctgtaatcccagcactttgggagaccaaggtgggcagatcactcgaggtcaggagtttgagaccagcctggccaacatggtgaaaccccatctctattaggaatacaaaaaaattagccgggcgtggtggcacatgcctgtagttccagctacctgggaggctgaggcaggagaatggcttgaacccaggacgtggaggttccagtgggccgagattgcaccactgcactccaacctgggcaacagagcaagactccgtctcaaaaaaaaaaaaaaaaagaggagcctgccaattttgccattatgatgacagatgatggggtggtgtctgtttagcacatgtcacagggtggcagcgtggggcagtgacatggaagcgggaactccgggccgcacaagttcaggttcgaatgtcagcctccccctcggagctggggcaaactctcagcctccctgagcctgtttcctcaacagtaaaacacggtcctaacagaggtctcgtcacaaggctgctggggcctgcaggaggacacgcccctgcaggggacacaacaccgcccgtgagtgccgagtgaggacacggccatgggtctgctgagggtcccggcgctccctgcagagccggggcaggcgtctgtccacatagggtcctcagagcaggtctgcagctgggcaggccaaggccagcatcaaggctcaacacccagtgcccaccaggcctccctccaggaagcccatctcgccaggtggtgcgtgcgcaactctagctttctctttctggcgccttggagagatggaagccaaaaaagtgacccaatcaccctgcacttgagccagtgaagccactgagtgcccccatggtggggccgcctggggccctagggaagggtgccacgtgctctgaaaaggctcacaagtccccggcaccctgcaggcccctctctgaccctcgtcaagcctccaggagtactggctttgcttagagcctctggagggaatctccctttccaggaccccctggcagggccagccacaccctcctggccaccacctacagaccccaatgcaccaggtgaagacaagagtagcagcagccaatggctttcagtgccccgcaagccctgtgcagtgctagacctgagatgtcccacccagctctcgccacctggagctggaaaggacatgcaccttctcccaggaggagcaaggctctgtcgcatccagcgacccatccatggtcctctagctggacgactgaggatgctaacaactgccaggagaaatggtccagtgtggggcggtccacctggcgccggctcagctgagtgctgggctcacagcagcctccagcatcgtttcctgaaccaatggaaatgagccactcctcccacaccgcctacaggaattgctcagacagggatctgaggtctcgggaagagtcccggctgttctccacccaaggccccaagtgcacctcggacagacagaccaggagacttggagtgagagagccactggcttctccaatgattgttaactgtcttgttccatgtttaaaagtccccttcatcttgaggaaacttcccaaggtggccacaggaatcctcgctgccctccatgcttctcgatctgaagtaacggttgggtcctgactcaacccaactgctgtgagctacccggggctcgggtctgtgtggcaacacgaggggcaacctgcccacagcacagcaggcaccgcatccccatgaggtggggcgcggtggggagaaggaagagaaatgagtcttctggttctggccaggagatgctctgcgaatggggaagagcccagactgccctgggttcaaatccgcccttcccgggcaccgtgctgaggctccctgaggctcggttggctcatctgtgagatggggataacagtgtctacccgtgtggctgtaggtgaatgagacggagcctggcccaaagcagggactcgcgcacagcttgcggaaaggggactgtgcccgatcagaaggtccacggagggactcatggctgcactccatcctccacttgctcgaatgaagaaacaaaaacagagcaaagtactaggctcagggccagaagcgtgcatgtttgttatgactttagaagacactcagaacccctgaagggtcccgccatctcctgggaatgccgctctggcccgtcctatccctgcagccccacagcttcccctgctacttgggatgtgaacctgagcacgtggttcctccagccaaacctcagtcaagacactcaagccaggcaatagtgacccagaacaatgacccaggtggatgcaggtgtgccttacaaagggaaatcaagctgggtgcagtggctcatgcctgtaatcccagctacagcctcacttgagatgaggagttcgagaccagcctcggcaatatggtgagtccccatctatttattctttttttttttttttgagacagagtttcattcttgtcacccaggctggagtgcagtggcaccatctccgcccgctgcaacctctgcctcccgggctcaagcgattctcccgcctcagccgcctgagtagctggggattacaggcaagtgttaccacacctggctaatcttgtatttttagtagagatggggtttcagcatgttggccaggctagtctaacctcaggtgatccgcccacctcggcctcccaaagtgccgggattacaggcaggagccaccacacccagtcccatctcttaaacaacgacaacaacaaagtctttaaggccaggtgcagtggctcacacatgcaatctcagcactctgggaggctgagacgggaggattgctggaagccaggagtctgaggccagcctgagcaatacaacaaaactctatctctacaaaaaataaaaaaaaaaaataaccagatgtggtggcatgcacctgtggtcctggctactcgggaggctgaggtgggaggatcacttaagcccaggaggtcgaagctgcagtgagctagaatcatgccactgcactccagcctgggcgacacagtgaaaccctatctcaaaaataagtaaaaattaaaaagaaattggagccctgagccacactggcgaccatgtgatgagccatccgccgacccagcctgctctcagaggctctgccgatcagaagagctttctggccccgaccctccgactgtcattagcaatcagtaagcaggaactgcacagacctggccccagccgcagaccttccttatcagccattaccacacatctggaaacacacacgcacacgcagcccaacggagccaaatggcaagattatcaaactcatttgaatatgttgccccggaaactcacctatctgccttggaaatctacagctactattgctgcatattcagaagcaaatcattataaattactttctctaactcagcctgtgttatccttcatttttttttcttttttcttgtggaaagcacggacagaaaaatttggggtacttgccttcagaatgacaagcgaccatcgagtagtgataattacaaaacatgtgcaatcacagcttcacattcaggttttgccaccaggaggaggctggaaaaacaaaagcgagcaggaaaggcacttctcagccagtgcattgggcaatggcagggctgtggggcccaacatcaatatcagaagtttcttctagggggccggcagagtgcaggaagagaggtgggagccgcccccaggccccaagacagctgagcggcaaaatgaaaaatgccactcactcgagccaggcaactagcagcgactctgaaggggaatgcatgaaaggagggtctggttgtccttacaaagaagatcagggctcgaaagtcatttagaaggaaagaaaaaggtgagagcaacttctctgtaaatgaacagctcagaattggcccactcttcctggagctttcaacaggatgtaaaaatgatacccaaatatatacttcctcatctcagtgggtctggatcaacaccttcaaatgcaggagtctgagagaccacctgagccttggggaccagcagcccgaatctttgtgtcttacactctgtgggtgctccttgtctatgacatagatggataagtcggtgggtgggtggatggataagtgggtgggtgggtgaacagacggatggatcagcagatgagtggacaggtgggtggatggacagatggatggataagtgggtatgtgggtggataagtgggtgggtgggtggatggatggatagattgatgagtggatgggatgggcagatggatggataagtgggtaggtgggtgggtggatggatatgggtgagtgcgtgggtgggtgggtggatggatggatggatgagtggatggatgggcagatgggtagacgggtgggtgggtgggtagatggatggatggatggatggataagtgggtgggtgggtgaacagatggatggatggatgggcagacaggtggatagatgagtgggtgggtgaatgggtggataaatgcgtgggtgggtggatggatggatggataagtgggtgggtgaacagatggatggatggatgggcagatggatgggtgggcagatggatggatagatgagtgggtggatgaatggatggctggctggatggataagtgggtacgtaggtgggtgggcagatggatggatggatggacagatggatagataagtgagtgggtgggtggatggataagtgggtgggtggatggatgaattgggggtggatggatgaatggaggggcggatggacagatggtaaatgggtgggtggatggatggatggatgaatagatggacggacggatggatggatggatggacagatggatggattgattgatggatggatggatggatggagaagcggatggatggatggatggatggatggatggatggatggatggatggatggtgggtagatggatgccgactcagagagatccctttgccccagtcccttctgatgaagtaaggagagaagagagagaagatgagcccctgacggcagcctcatacctatctccctgagtccctaatacacccttgacaatttctgtacaaatgtcctccctaatggtggggggtcccaaccacccaccatggaggcaccactgaccctattttgccactgagaaaacccaagttcagagaggtaacatgactcgaccaaggtctcattgctgtgggaggctgaagcctgggtctgactcagagcccagctcctaacagtaaggtacctgagagccaccacctgcccaggggtgggggccagccctgccccttctgagcccccagcaggtggttcagggacacagcctccagctagaccctggctccatggggtcatcgctccacccttcctctgagtgtctgccccactgggaatgaaatgttgggattctagtctggaaggttctcccagctggaatcacatccaggactctcaggcactggcacagagggcagacctgaaaatccttgtgagctcctcaagggggtggctgagaagcccccagagatggcatagctgtgaacgggacactggccagggccagggatgtggggagactgatcgtatgtgaaccagggcgtcagtgacctggccgaccccaagagggaagagaagaaaggggcaggggcaggggccagccccaaagaaaactgcaagccctggcttcctccctgcatgctcggctcccagcacccacgtcctccatgtttccatggctgtgctgggtgggtgactgcgagtctaacttccccctcttctctgccatggtgtggccaggctagaggaaaagggctgatggcgtcctcactccgcgcaccgtcttttccccactgcagtcagctacactggcccagctgccccaaccagcatgtgggggcacagcctctcctcggcttgaagggtcggggtcctaggcccagttcccgacacctccagaggaaacccaaagcctggagcagaggcaggaaggctggcagggaagccccgggggtcagagtcgctttgtgcaccttgggacccggggagagaagaggctggaagggagaagtgggcccaggtggcctcctggagcacaggaggaggcgtaagctggtggagtatccggggcagcacgtcctctccaggcggccactccaaccatggggctctgggagcttcttgactaagacagagtctaccgctcaagaagcggggcagatgggtggacagaaaagcacacaagggggtggctcacgcctgtaatcctagcactctgggaggcagaggcaggcagatcacttgaagctagaagttctagaccagcctgggcaacgtggtgaaaccccatctctactaaaaatacaaaaattagccaggtgtggtggtgtgcacctgtaatctcagctacttgggaggctggggcagaagaattgcttgaacccaggaggcggaggttgcagtgagccaagcttgagccactgcactccagcctgggcgacagagggagggggcgggggggtgggggagggaggaaggaagacaggaaaacacacaacagcaactgggctcacatgttagctgagtgcctgctctgtgctgggcatgtgagggaagctgcaatttaatctgagatcctgagcaaaacagtacagaggctcagaccaggacattacgccagagctgggatcaagtcctaagcctgccacggacgatctcagccactcctctctgggcctcggtttccctgtgtgtggaataaggaaaccgcaagacatacagatggcaaagggcgtcctgccacactcccagtcccactgtgctcacggtggagtcactagctggtcaccatgcccctgctgaagacactggcctctgcagctgtctctgcacagtgctccgggcagacgctgcctgtgaaagcaatcagcacccaagacaggagcggcactgccctgggaaacgcctggaccaatagcctcaggtcccctgaacactgactgcccactgttcctaatgccagcacggaagccctgtgtcccagggctgggcaagctgcatgaggcagctgcatcaggcggcagctgctccccaccaggaaactctacaggaatcagtcgggggtcaggggctgttggggggaatttcccgtccttcatggaagcagcttagcagccatctggtccaaattctccaattttgagatgggaaacctaaaacccagctgggaagatgcaagagcttcacaagcccacccagcaacttccaggcagggcccagcctagaacgaggggttcctgtttggagcctgaggctcgtctctcccagacacggcgtcctccaggacagctaaccaccgtctaggcctcctgcctgccagatctttcccaggtttatttcattttattccctcaaaaccccccacgagatggttctgtggctctcccctttctgaggaggagtcaccggggctggggcagacagctggtgcctctggcagcagagcccggctctccacgccgccctgccctggagggccggctatccatcctggatttgaagctgagggacaaaccacagcctccaggcatgaaagcaaggtttctgagtgggggcctgcagcctgcaaggccagtaaacctgtcccagcaagactggctgggcaggctgggccactcactgtctgcgaatgctgctctctcattcccagagacactccccagcccctcctgggcatcactcagcgctgctgtggctgcaggagccaggcacagatggcgcctccctcccctgtccaccaggaaaaagcggggataaaggtgggttccagtgtgggaggcatcccagacccaggctgcagacgagccgcatcagtccctctttaatcagaggcaaggccggagaccatgacacagatctgctgcctagcgcgtgagtcactgcctccaaggtacaagaatcccacaggaagctcaaggtacccgcccagaccttgaggccaaggtggggttatgggaacagcacctcaagggcaggagggaggggttctggcctcccccacaccaccccactctctacacagatgtcttgccccctccaagaacctcctgcgctgcttcttccttggacccttccctcttcccagaggtggagacagtgaaccaaggggctggaacacaggcgtctacacaggcagattcccatgtgggaccctaggatccatctccctccccagcccacaactgcagactgtccaggcaggaagtggggcgtggaggcctcatggagccaggcgctgtgcatggtccgagctgcaagaggccttgggggaaacatgcgtccagaaccctcaccttacacacagagaagacgggtctagaaatgggtgcgtctcatccaaggccccatagccagtcggggcagagcagccccagaaagaacaagggtgggaatgaggacggtcaccataaaaacagaatcacaggctctcccgctgcagaccccagactgagcgcttcacgggatcacctgcgtttctttcactgcccccaagctctgaactctcaccacgctcaggtcacgtgtgtgcaagccggggctcaggaggtcactcagggtgggctgggaacccgggttcacagggccagagccgagtgccgaaccctccgtgccaaggccagacccagtccccagccactgcctggcctggcttcacagagccaactgcccccaccacacagcccagcgccacagccccggggagctatccacagctgatgggaacaggccacccttctgccggctaaggagctcatcaggcagagggcaggccctgagcaggcagagggggccccacagacaaaaggcaggctctgggcaacccagaattgtagtcagagagtctgagcagctcgaagtgagggctgcctggaggaggcgcaggcctatgataaagtagcaaagaaacaggcgatccccttggaggcacagactgcccggcactgcagcgcacggcaggactgaccctgccagtcccttcaaaagctcagctaccaactgccctgcgccaggacctgctgagaaacaccgcaggaacacacgcgaggcccccgctccagtcccctctagcacaagaggctatagaatgaattgacgtttgtgatggctaatgtggctaatgctacggcaccatcctgcctgggctaaggggtacccagagggcaggtaggacattacctccggagtggctgggcagcatttccagaggagaccagcatctgagtcggcagccgagtatagcagacgcctcccgtgccctcgggcctcacccaactgcgggggcccaaacaggtcatgatggcagacgaaggccttattcactcactgcccagcgggcacagccatcatctcctgccctcggacatcgacgctcgtcgttctcaggcctttgggctcagactgggactcacgccatcaggccccttgggtcttgggccttcggatcaggactggagctgcactaccagccttcctgacctccagcttcacagcagctggtttcaggacttctcagcccccaggatcgtgtgagccagtccctggtattaaatcttcctatctatccatatgctatcagcgctgctgttctggagaaccctgactaatacaatattggaaaggagcatgcatctcccctgggatggccccattcaggcacgccctgctcccacgcccagcaccactgaccgctgccagcagaggcgctgtggagacaagagtggtagggggcaagggacggggtgggtgtggagcaaagactattcccctaaggaaggcaggccccctgggactgagggagagcagccagtcagccaaggccaggagaacgtgcaggggcagagcccacgcacaggcccggagagcggccatggccacacaggggaccaaagagcggaggcctgtcggacacagggccaaggagctggcctcgcctggggcagtgggagtgcagggtcaggctggtgtttgagagatgcttcaggctgcaaagaggatactgggtggagggaaggcaggaccgcgggaggggggcggccccaaggagtcttctaaccaggccaggtgcacgatggcaggaaggcctgggcaggaggccacagggatggacacagccagagaggacacagccagaactgtttaaaaggctgatcaaggctgcctgggtgcaggggtgaggcagggaagagagaaaccatctctgtcctttctgccaggagacacagaaagggctggcctgaagaacggggacaatgggggaggctggccaccggggtctggacgcacagtggccagctacagaggggaaggcaggggatgccagggctggcgtctgggcaaggctgagcttaaacccttggtgtggccttcagcaagtcgctgcctgccccgagtctccctccccacccacctggggaaaggggaggctgagaggcacgtggttatctgagccaccaccaccccatttctgtttcccacagaacccccgcccggcctgctagacccccttctgccaccttcctctggcctcgggatgccctggctgtacgaggagaggctccctccgccctcaaacagttgccagcgcctttcttccccagcaggtaactggcacactccacactctgcacaacgatgccaagatgcagcccacaaagctgggacccacaccccagacacacagcaatccactggccaggcggacaagcccaaaatcagccactgcccacaagcagggtgggaccatcacactgccaggaaccttcttggaagagccagtgcttgtgttctgggtgacacgttcggctctgggctcaaaagttaccccactgcctccatgaatcctcaaccacccaatgaggtcaatgttactatgccccttgtcaaatgatgaaactgagggtcagagtggtcacctgcacacatcagctagatggtctgatgcaagctcttaaagggaaagcacccagaaggaaaggcctcagcctcccgactgagcctcaccccagaacccccctctcatggcctggtcatccactgcacgttcccagtctgctaatggggacaggtgacagtagccatcacctggaggggctgatgggtttccagtggcttcactggcctccctaattaatggccattttaatgggaaggggactaataactgtatctctaacactacggcaataactttccagtgtctacccttatctctgaagcgatgacttagtaactcggttattaagtgcaagcgttaacacaggacaggaaggtgcgtgaatctcctctgcgacgtcaactccacacctgctcctgctctgaactcccgcaggagtgcctggaagggcctgggaaagcacttggccccccgacaccccccactatttctcccctaggctgtctgacggtgaaggagggtgtggggcccacccaggcccttaggctcagcaggcgaagtctctttgccagtctcagcgtagggctgagctcagcactctccgccggcctgcgtctcacagatgctccgggtgtaccacggggcaggcacctctgctgacatgtggcagccaggggaggctcagaggccagggacaggttgctggcacctctgcggccgtaggagccacacaaggaaggcctcacacgaaccacacgcactacagagccaactgcgacccaagcacgatcgaggctgtgtgtttctgaaaggatctgaccgaactgagcactaagattgttcagaatctggccaacgcagctccccatccatccccagccaggtggcccatggtgagtgaggcagagtcttggtttcctcagctgtgagatgggggcagcggcacccgcaagagtaagggagacaacacactgcccacggctgccccgctgcagtcaccatcatcgttgctgcccctcctgcagatgcaagcccccacctccaccaccgccaagtcctctgtgcatgtctgtcacaggacagagcttaacctttgagaggccatccctgctgaccccacctgccgcccgtctcaggaggaggattcccaggaagtcacaaccgcagggggatcccccaagcagtggccacgtccccgccacccacaccagggggtcccgatccagccagtgggtttccaatgggtgtgcaaagctgtgggcagtgggggcaggggccagggacagcagctgagcactcggagtggaagcgccctcggcccgggcagcctggcctcctttgcacatatgccaggctcctccgcaggggcagaaaccttttccccagggtcgggtcgccccattcgagagatcaacaaatccagcctttgactccatggagcaggagcatggtggggcaggggcagggaggtgtctcctcaggatccccccgttccccaggcatcatccgcccccatcccaggcatcctgtgacatagtcttccagaggggaccgggccgggcttgtgctgctgaacctggctctggaccccgtctcagctgcagactcgcagcagtgccggagctctctgcgccccaggccctcctctgtaacgaggccctctgggggctcttgcttcctcactcaggtgtgcaatacactttgagcagctgctgcgtaccaagcactgtgctagggtgacctctggagctccaaggaaccagcagggtgtgatcaatgccgcagggtaaagaacagagcagctgggaagcaggggagtccagcagagtccctaatcaagcaaagcaaggggcaggagatgtccaggaatcagagaaggccctctggaggggctgctgtcaccttgaggcctgcaggatggacaagtgtgtgtcagaggctcaccataaatgtgggcaagcctcctataagaaggcatcgatcagtaggtggccccggggcactgccacagccttgagcacctgacattacagacccacagggcaaccaagtgcacatctgagtcctctgccaaatgcaaatctaagcaacaagccgcacacaccaggacgaacagcactgctggctcagatgaaccaccaagaacctgctctcccttccaaagcagaacctatccgagaatccctaccgccttgcgagctgcaagtccgatctgtgcaatgtgagcccctgcaggaaaaaagtctaaagtgatttttcctccccggtgctttgtgtttatggaaacagatggaaaccggccgcagacgaagctctggcatccagatttgcttccaagcggttttaccttgatgactgcttaatcctggcccatcaagggacttcccaaaatggccactttatggatttttcttttcctgtctaagggtaggattcaaaaatgcacttttcccagaaaagattttctaaaccatgagagtgaggacacggataaggacaaggccatctggaagtagaggagaaagaagagacgctgcatggggaagacaggccaaggaaggacccacctggacccacctgcgccgtctgcaggaagaggggctaggcatccctccaccagccccttgcccacttggcactcacgagcagccctggacaccagggtacaaggtgtgtccccaagaagctctgtgtgccccaccggaggaaagagccggcaggcagcacggggagggagagtgggcaggaagcagctgagctgagagggagcctctgaaccaggcaggtggtgagggacctgtcagccaggctcagggactcatgagatgataaaggcgggcagggaaggacaatggccttaggggcagccatggggaactcccaggtcagaaaaggctggatctgaccgatggttttataaaagatgccttttacacgaagcaccagggacagcttctccagtaggaatcttgtatatgaagaaggggtgggtgcggggggcactgccaatgccaccgcccaggggaccaagagatggccaagtgaatgtgatgtgcagtccctgatgggtcttgggacagaggacataaaggggaaactgaggaagccagagtcacttcagttagtgacaatgtgtccacactggttcattcattgtaaccaaagcaccaactactgtgaggtatggatgggggacccgggtgtggaatacaatcttcttttgcactagcttctcaattttgctaagtctaaaactgctctaaaatatctaggtaaagcaggggctgcccctttggcaggtcaggtgggcagcaggtcagcttctgcggtcggccctccaggacactggccgtggctcaggatggaggcaggtgaactgcaaggatccctgggcatgagcctaggtgctgccttcggtggctacagcacagtccccccactgtcaggtgctcccgggggcagcaacacccccctccatacaggggcaggttcagcaaggggccagcagcccagagctgggggccatggcccacccacgtcccagagaggctgggcagggagagaggccctgctggcacagggcccgaggtggtggagctaggactggccttcaggctgctgggcttcccaccatacgacccggagaacttgtccccagaaaagctgccttggagccatgggctccagacacagagagatgcggccttcccgcaggcatgatgctatctgcagatagcggagcgcagacgtgggacaaggccctctggaatgtgtctggacttgccccacaaggttcctcccagtgagacggggcttgtgaacaggactgagaaggaggagcgcccagctctcctgcatcccatcaggggcctgggtgacaggaggggaggccctgcatgaaggctgcaaaggagtctccaaggcaagctctgacggattcccaggcagctcgagcctccagcagaggcagcaggtggagacgaggaactgacgaggaacacagtccacagctgggaacacaaggaagggggaaggtgcagagaaaggcctgagatccatggtgggcctggcagccagccactggaaaccgccgaggtcccagacgtccttgagggtggcctacaagtggccgggaactttgagaggccctctcatgtgtctgataccaaatgtataatttaatattctatattttcagcccagacaggaattaattatttaatgtcctatcaaaaccaactccatccttcatactactccaggcagcgtgtgggggcggaagagttcagtggccccggctggcatcacggcaacactggggagggcgcagatcagacacgcagcaagtacgtgctgagaacctgccagggcgcctggcacaggatcccagcatgacgcctcctgcttgccaggtgcccagcgagtgtgcggggctacaaaggagggcgtcaaggtttcaacctagtctccactgactctccagaaggttcctctcccaagagatacagtgccgaaaacaaaagaggcaagaggcagccatccccagatagctgtgtggcaggccccaggctgtacgggacacagtggacagacaggcccagccatgccctgcagagctctcggagattccagggcaggaagcagactgtcaataaacagaaagcaaggcaaagaacatgctgggtccagactgaaccctgcagtgaagcaggtgaagcacgcaggccgccaagggcacagaccctgtccgctcagccttcacagccccaaaggggcggccctgctgtgcctggcccgaacatgctgccgtcacagccagccgacatctgtacggggctggagagcatcccctacggttcatgtccttcctggaacctcagaatgccaccttctttggaaataggatcacagcggatgtcatgagtgacgatgaggtcaccctggagtaaggtgggcccttaatccactgtgaccagggccctcaaaagaagagaaaagacatagggagaaaggggaggccatgtgaagtcagatccccacccccgcgacctctggaaggagcgtggccctgccgacaacaccttgagtttggaattctggcctccaggagagggcagaataaatcccccttgttttgcggcaccaggtccgtgatacttggctatggcagagagtggacgccagaaaaaggataaatgtcacaaacacagcgctcagcccttcagagcagacagactcagggatacaaatgtcataaggtgacccctggggcccctgaacccctgcagcagaggcagccagccactgagacaggacccccagggagcagggggcgacagctgagaggcccaggaggacaagagggactctgccatgccaagaagtcagggacggtgtgctgtgactgcagggacaggggttccaccttccccagaggcctctggcaccctgggttcgggatgtgggccccacacccaccccatgccaggcttggccccctaatggccctctttcccagggaacaacctccccaggctccatccctatgtccccaccccctgctgctctctctggatccttccctcctaattggcatggaaagtcaagtccctgagcctgcaaaagactcggctgtccccacacaccactcctggagcagatgggcccttcatcatttgctcatttcacgttcccctaatcatgcgaagagccctggtaattgacaacgattctctgcacaaatggcggacccacagaggagcgaaggcgcagagacccatccgttgagacagcctccctgccggggtgtgccaagtgagtgtggggctgacgggtgtgagccacagtgggcagtcagggccagggagaggaacagagccgagtcagctgctgacctgctgcagcagctcagccacttaaaaattcgtcggaacatgttgaaacaatgaggggatagaacaaccactcaccctgcagactcccaagtcatccccagccacggcaggcagacagcccagcagagactcccaagtcatccccagccacggcaggcaggcggcccagcagcaggcaggtttcagctcggccggagcaggccctcaggcactggacctggggaggcttccggtcacctgtgcaatgccaccagcagcttcttgcatgcttcccatgacagggagctcactacccaaggtggcggacgagaagccctcccgggatccagtgccactgtgaggctcaagtacaccccaaaactcacacttgaggtccacaggtgactagcaactttgcttaaattgattctagtaggcccggtgtggtggcttatacctgtaatcccagcactttgggaggctgaggcaggcagatcacaaggtcaggagatcaagaccatcttgatcaatatggtgaaaccccgtctctactaaaatacaaaaaaattagctgggcacggtggcgcacacctgtagtcccagctacttgggaggctgaggcaggggaatcacttgaacccgggaggcggaggttgcagcgaggcggaggttgcagtgagctgagattgcgccactgcattccagcctggcaacagccagactcagtctcaaccaaaaaaaaaaaatgattctagcaactcatgagcaaagagagggaatccaaaataaatggtaaccaacccccacgtgcacacgtgcaatgaagccacctagatgagcagcacgggagcacactgaatgaacatgtgatcattacccaccaccaccacgcgtcctgcctcccagctggaccccaggctcctccaaagtacaactcaaaggacgctcatcaaagcagtgcttccttaggcgcttgggtgctcactgcagtgggctggctgcccttctcaacgcccgccacactttgtcaattaattagggaggggggtgccagcctggggggcgtggtggggactccgcaagcactcaacagatgctggcccacccaggccagcctctccacccaggccagcctctccacccaggctggttcccaggctgttactttatggaacatcagcaagctgaccgcttggcacagctgcctttttctatatgcataagatgcttcaataagaagcttgctaaaaagaaaaacaaaaaaaaacacctctggctttaaaaatgttttaactccaaagatttttaattagctttattcactcaaaacacacggataagcttgacggctccgtgagaatgctggtagggagcagaaccaaacacccagggaaggaagcaccactgggcaggcagctctatcagagaccacaggtgcacacaagcatcccctcccactcagccagaggggcgcagcgctgtccacaactcacaccctcagccccacttccagcctgatgaacccacctgagccagccacagtgacaggtggagcctagatcattccaaagactccaaagataatgccaaaggctccacttccaggccgatgacaccatctgagccagccacagtgacaggcagagcctagataagttgggcccttctggagggttctctccagaggactggcaagcacagccaatattcatcaaaatgcatgaatcttctctgaaccagtgacttcatttgctccagtgtcctgcgattgattcttctgaacttctgagcccactcaaccaagggcggcccagggaagggcatgtatgcagcccccgcggctgtctacttggtccatgtccagccgcagtggaagcgcctgccctgcccagctgcactgtctgcctctgcttcttccccacaagttcaaggtcggtgtactcaggcatccctgtcacatcgatgagcaaacatggcccagcgatttgtgtttctcagagccctctcattccaaaacaagtcttgatccaagggcacagcggtggccggtacttcctgagggcctgccactgtggactctgcaagtgtcgtatttactaataatggtgcaccgccaggagcgtgcaatgccattcagattttacacaagcaaggtgctcaggccgcaggggagacgtgaccccagggcggacccctcccaagcttggtgtggtgttctgctgggcccccacctccaatttccatctaacagctctgaaatgactggactctgcatctggcctcaccaggtgatgctcagctgccccaagatggaggtgggcacacgctccatgccatctccctgacctcgcaaacccaccacggtgccggcacaaacccttcacaaagcactcacccacttacccttgggctggaaggaaccacaggcgccactgggacggcccattggtgacaaccaaactcaggtgttcctgagtgttcctgagaaccagagttctcagctacctacaaactcaccattaaggggactatgctagacaaccaactttaaacttgttacaaatcccagagagagaagcgtgtgcaggagactggtctggtcccatctccgtactgacagctggggggcgggaaggcccagccgggcccagagccaccctgggaggctgagatgcagctcagaaaccaggggtgaaggggctggagcaggcggggagggaaagacaggaaggagcacccatgtgggacccagggtcccagacaaccccaaagcttcctgcaggtgggaaagctccgccacatgcaagaaactccgcaagaatagcacatgaggggctgggcctcgtctgatgcttgcctcggcccagaggcatctgagcagtggccacaaagcctccatcctggaggaggagtctcagagcctaccgcgtgcctaaccctgccacagggaggtcctttataattcagaggctaagtaacctgctgaaggtcacccagcttgaaggactcaaacccatgtccatctgacgccacagtctgagctctggccagggtccagctctaacctcgtcccagacaagaggaagccccagacttgacagcaccacacacctgagcctgggccccgtgtcggagtcagtgaggcccacgtgtttgcgcctgtgtctggggggtgcaaatccccaatctcctactggagacaagaaaacaagatgggcccagagacagcacagagcccactcagccctgctccgcggggcacctgcacacattacacaccccgccaagaccttcctcttccgctggcaacacccacgtccagaacaaccccagtggctgcacacagggtcagagctctgttaccaggagagcaggtgaattctgcaagcacaaaagcctgtgttcataatccatactccaggggtctgctgggcttacaggtcccctggcttggggcaggtggacaggaaaaggtgtgttccactcttccaagatgcacaggaggcccaggggcagaggcggcccttcaggcaggactttcccagtcccatgggggagggaagccagacaaggcaggtgccaagccccccctccccaccccgggccctcctgctctccctcagcagtggtggttcccagaggggttccctggggctcagcccaactcagaggagggcccagacagcaggccccacgcagaaatcgcacctcctttggggcagggtgaggtaggggccatctgctgggcccattcagcaggaagggacctcttcacctccacagccctcagggactccccatggaaactaattgcctcaaagcataaaaccaccccaggatgggggtgggggaaggggcagtgagggccccagacccccttggatgggaaacaaagctgaacgcagctgctccaagcccacccacctgctactccagggagcgcatgccccagcagaagctggattttcagaggtgtggacatctggccccagggaattcacagggcctaagatcctgccctaactctaaaaacagcaatggcagccccagggccatggtcggatcccaccctaccccaccccacaaaatgtaacttcttaaccattttcaaatgcacaagtcagcagcactgaactcactcacactgtgcagccatcaccaccgtcacacacacattccccacgcgcctccctggggacaccacggactccacttacccccagcagagaccctccccaaccccagcaccccagggacatcagaggctgagggatgagatcacagcagccaggacacagaccagagggatgacggccagcctgacacggcgatcagcgaggccaggaaccgcccctgcccctgcctctgcctcccatcccccgccccccacccaggggctgcttttgcatcttcaggggagggaaggtaaggctcctgcgtggccagcctcctcaccaccagccctgaaggaaagacgaggcgcattcacagcgaccctcttccacgtagagcaacgcagcgtccacagaaggcagccactcctctatgctccccaccaggaacccccagttcccaagcccgagcttaggctgaagggtagaccctgcccaggagcaccccttggatgagccttgagggccttgtgctaagggaaataagccagtcacaaaggacaaataccacgggactccctacaggaggtccccgcaggactctcttacatgaggcccctggagccggcagactcacgcagacagcaagcagaagtggggagccaggggccaggggaggctggggtgagcgctgaatgggggcagagtgtccgcctgggcggatgaagcagttcgggagacggacggtggtgacggctgcacagcaacgtgagtgtgttcagagccaccgacctgtgccctggaaaatggttaagaagctaaatgctatgttctgtgtattttaccacagtcaataaaacaaaacaaagcagcagctgcatgtgggggccacgcacacctggatcttccaggcctccagctcttttgaacccaaggccaaacacggacaggcaggcccagacatgtctgtccctacaccaccggccctgggtcatggggcagtttccatagaaaccgctgtgtccaggagccacgtcactctcacagatggacagacagacggatgcagctctgggaagggcttttccagcttccacatctccaagtctcagcctcatcgtggacacgataagaccaacgtcccccaaacagggtcagagctagacaaacaccagactccaccccaattagtatcatgagcctgagccgactgatctgttccaaagggcgtcatcccagcggctggctgcaagatacttaacatttaatttctaggtccagggaggctgccattagcaagattaattgtgtgcacacacaatttaatttcccccacctcagaaacaaaagtgacacttaccccaattacaggacgctgggccctggcggacagcccgtcattcgcattcgcaaggagacgacacgaacagcatggaaatgaagcgcccctgccaggggggcagggacaccgcgtccccgtccctggggaagcctcacttctgaggagctctttgctgagatcaagatggcctgaggcaggtccggcagggatctggagctgagctgaaaggggtctcagtgctgcctgctcttccgccctcggggtgggaaaccgaggcccagcaaaccacaggcttggggtcggataccagatgaccccagacaagctgacccccaggtcttggcctgggttcctcgtccaggaaactagagtcatcacagtgctcctcttacagcgggtgccgaagggtgggggctcacgggcacgagcctagaacatgcccacgcctgtgtgggagacagcatgcccactctgggtgctagctgctggctttctagactggcctgacccctcctaagagcctaggagtcaaaggggtgggggaaggcggccactggcacagtgatctgcggtcctcggttcccttctctccccaaggccaccctgagacccctggaaagactaagggatgcttgggagggaaaggcactgggtccagggcctgggggagcacatagcttgccttggggcaggtgtgggcagcccacagctccgcagcaaggaccaccccagtcccacactgcaactgcacaaatacattaagccagccggcccgtcagcacctgcttcctcagcgaccgagtgcgtcatgaaatcccaggaaactccccagggcacccaacgaggctcggctgtttgttcagaagacatttcatttacacacacacacaaaaaatttttttcttctctgtcccccgttaaacctaatcaggcttccccgatgtgatggtgttttactcatgtctcaactgttaatgtcgatacaaggctgaagaccccacagcttccatgaaaaaagaactccaggctggaatattagtgtttcccatgaataatacatgaccccgcagggccactcctgggatgactccacgaattactgtctctgcagtggaaggacctgtcatcctggctgggaaaattagctagtaactaacaggatatgggcacactccgggaggctatggtgccagggtgtgggatggtgactcgcaggggctgaggcaggtccccaggcaggagtggcagccagggcatgggcagcacggatcgtgccagcctggcacatccacagggcacagagccctccacacagccgagactccagggggtggaaccagggagcccaggccgggagtctgggcagtggtttcttccgaggagccagaactcggctccaccgcgaccacacggagccttgctgcctgtcacagagggactgacggcgcgtctcacgcaggccgtggggcaaccaggaggaatcgtggctgtgagtccaggagtgagcacggactgcagcttcccagccccggactacatttcttccttccaagaggtgcaggaagaaaccacttgggagagcagaaatgggaaaagtgccgagggtcaaggggccacggctctccctagctggagcaaagacgaccgccccccaccaccccctagagtccctctcccctttgtccatgagaggcagatgcttgatggctcaggactgcctgctaaagacagcactccccaccctcccttgcagaaaggaatggccccagaaccacgctctggacactgtgtaagaaaggaaggggaggtgaggaagggtcatgcacttaaaaggaaacagctgcctcccctgcttctttcctgctgcatggaacacggacgagatggcaggagctcagcagctaccttgaagcacttaggtggaagccgcacgctggtgacggcagagtgagatattcagcacgcctgagctgcttgtggggactatggcactgcctgggatgtgggcactacggaggggcatctctcttgctacctcactgccagccacccatccctgcaaactggcaaggacctgccacctttcacacctgataaacaaaaatactttaaggtcttctaatatctatttgggcattttctggtctgaagtggggaagttaaatgaaataaggtagaggagtgaaaaatgtaaaaaaggcaaagaagattttctctccaaggctcttgcaagggagcaccagagccctgctcaaggtgctcagcaagcagaggcccgggggacaagggtgcagggggctgccagggcccggcactcacgccaccctcaggaacacagtctccagctccagcttcttctccctccctccctcccactctcagcaggagggatgggggggagggtggtggggagggatggagggaagggatgggggatggagggggagacagaggggaggaatagaagggaagggatgaagggggagggataaaggggagggatggagggggagggaagggagatggaggggagatggaggggggatggaggggggacggaaggggagggatgaagaggagggatgaagaggagggatggagggggagggatgaagggggacagatagaggagaaggatggaggggaggcatggagggggaaggatggagagggatggaaggcgaggtatggagggaagggatggaggggaaggagggaagggagggaggggaaagaaggagagggatggaggggagggagggcgggggatgggggagggatggagggggaagcgggagggatgaagaggaggaatggaaggggagggatgaagggggagggatggaggggagggatggagaggaggcatggaggagaggcagggagggggagcgatggagagggatggaaggagaggtatggaggggagggagggagagggatggagggggatggagggagagggatggaaggggatggagaggagggatggaggggaggcatggggatggagttgggagaggtggggatagagggcgtggagtgagaatggaggagaggggtaaaagtagtggatgagtggaccaaggcattcgggggagaggtggagagagagggagagaggaaaaggggatggaggagagggacaaaggacggggtgccaggggtgtggggagacgaaagggatgaaagaggtggggtgtggggaggagggggaaggagagggatgggggcattgggtacggggtggaagggacccaagggcggggtgggggatgatggaacagaggccagtggtgcaggggaggggtagagggggataaaggggagatgaggggaggggtggggatcagcaaggggcctgctcaggtgccagtgggaacaggtgtcccgggttggctgcatggggctgtgctgctaggaagtgaggcctcctggtgcttccgcagggctgcagggctttgtgagccaggagtgtcctttgaacacaaacaagcctctgtttattttggaaatgtgggggctgaggaggtggggagtgaaagctgacactcattagagcacccttaccagtgcacacacctctgtctataagcacactggggaggagacagaattaagtcacttggccaagatcatcccaggggtcagcaaaaatcaatctgcatcaatccctgggccccatgcagggctcggccaaagggcagccgagcacctaacccgcctggccgtccctcctgggtctccgtgcctgaatcgggcgtcagagtccagcagagacaactgtccttcggctccaacagggacacaggggcacaaggagctcaggagggcagggcaggctgagctgcagggctagagggaggagaggactcacaggccagagatgcaagaggaggggcgaatccgggccaggcttcagctcagaggccattgcagacgagaaaagcggacctggcccagccttggcaataaaaagcattccaggttcttgtaagggggaaagaaagagccaagcggtctccatccacggggaacttgcccgagcccacccccagaattatcatcaggatgatgtctcacaaaaagacttcaaagtgagaccaggaacaccatcttcctggtcgtgaggagcaggttttgctgggcggtgaggggccctggcccttagacacgcagtaaggcggactcagctgccctttctctcagaggacagcacggtccaagatctatggctctgagtccgatctgggcacttaccagacagcctgagtcccacctcccgcgaagactcctcttgccaccctcccaaatccacaggcctctaaaggtgggagtctgacagccaggtgccttcaggctgtggaggggtcacacaaaggccccacagctgcagggtggagggtggagagggctgaagaggaagggaagaaggagaaagggagggaggaaagaaggaaggaggctcgggtggcgaaggcggcggcaacagcagctgggcctcagctggtcctcggtcccacagtcgggcagcgccacggtggggcagcgtggaggaggaggccctagcgacaactctggggtcctcaggtggcaagggacctgccccgcacggccgcctaccaggggcgagccctccctccccggccttcataaaagcaaaatctagacaaaggagccaagatggccgacacccactccggccagctccaaaggtcaccttcaagaaacggagtttgcaggaagtcaacggtgcctgcagaacaggggcgagcacccagcccagccaaggccaggaggagcccaagccttcctccgtcgccacacggcagctttcattgcctgaacctcggagggtggcgggacggtgattccacccacagccgcgatgaccgaggcccagcatcgcagcaagtggcagagaagccagagtccaactaccgcccctgaaacccaccgcacctgacccacacagcagcggcgagagtcgggcgcccacgtgtaccacacacacagttgaatgctttactggacctcacggatcctcacagacctctggaaagttctgtcgtaatctccaccttacatctgcagaaactgaggctcggggagaaggaagacagtaacgggcccaaggccaccccgccaagcagcatgacatccaccccacagcccatggctgagaatccatcccccactccccgcctccactgcccgtcagaattcagggaagctgcacgggtgagaccctagaggtcacctcgctggatccgccacagtacccactgccaccaccatgtccgctctaaagtgcactgtgagggatccagggaccgtggacacacagggttccaccctttcccaaggatgggggagccggggcccggcctggccagggatggtgccggccatcagcaccggctgcagccagacccagacctggtgcaactgacccaagaaggagacctaagctccttcaacaaaggctggtgacaggagaggcggctgggtgcatccatccacaaaaccaacaggaacactgtggccacaggagccacaaggatcacagggcccaataaaggtggaaaccgcctttacgccctctgagcccaaaggagaggcccccagaaaccccagagctccccgggtgaccctgcacaaggcggctgttgggaaattttgccacagttgccctctgtccagggaggcatgagggcccagcagggttcacaggctcccaggaggaggaggggccagccctttccccaccgtctcaggcagatccttaaccccaaggggaccacaaacccctccaggaatctaaggaaggctgtgggcctctccccagaacacagggcaccccaagaggctccagatcctggcgcccaccctggacccccagagaaagaagtccagacttggggcccctgaggtgaaacagcagcctgtcccccagcagggcctgccatgacgctatgaccctaggcagggtccagagctgagcactctgctagccctcaccggccctagaccctggggtaaaggacaggagacagcacaggcggaacacagagccctggccatcggtgtcaccgctgttgacgtgggaggcaggaggaagggcaggggttgatgttctgaagatcgcgtggggggcgtccggagatggtgtgggagagggcggcaagaaagagggagtcaagctccaagccgaggcaccgagggccgcccgcaggagaatgacaccagcacaaggggcaggggagggggacaggggctcaactcctacagcaaagagtcaacaggtgttgaaagcagggaatcaagggctgggctctatggagatctctgagggctccaaaggtgaccgcaggagaattaaagacacagttataggtgcagctcctgggggaggcctggcggggctggggtcggggaggcaggaggccaccattcatttcaagcctgtctgtaacatgactctttctgccgtgcgcatctataattaccctgcaaaaataaaaaataaaaatgtaaatgagcaactcaaatgtccgtcaacagatgaatgggcaaacaaattgcggtggagccactatggactatcacgccgacgtgaaaaggagagaagctctgattctcaccgcaacgtgccagcgggtgccagccaggcacagggacaatctattgtgacattccatttataggaagtttccagaccaggcaaatccacagcaatttgaattagtggctgccaggggctggggaaatttgggggggatgaggagttactgctaatgggttggggtttctttttgggggtaatgaaagcgttttaaaattagtggtggatacatggccttgtgaatacactgaaaacccctgcactgcacacttcaaacgggcgaaccccatggtgtgtcaactgcatctcaacaatgctgctactttaaaaagagcaagaacatcagctttctacacactggcaaaaaactgtcttgtaaggccagagttgtctggttctcggccttcttaattggcagccacactaaaatctttttttttttttttttttttaattgatcattcttgggtgtttctcgcagagggggatttggcagggtcataggacaatagtggagggaaggtcagcagataaacaagtgaacaaaggtctctggttttcctaggcagaggaccctgcggccttccgcagtgtttgtgtccctgggtacttaagattagggagtggtgatgactcttaacgagcataacactaaaatctttattaacgttagtaggtcgggcgcagtggcttacgcctataatcccagcactttgggagcgcgaggcatgcggatcacttgaggtcaggagttcacgccagcctggccaacacaatgaaaccccgcctctactaaaagtacaaaaattagatgggcatggtggcaggtgcctgtaatcccagctactcaggaggctgagacaggagaatctcttgaacccgggaggcagaggttgcaatgagccaagatcgcgccattgcactccagcctgggcaacagagtgagactcagtctcaaaaaaataaataaataaaataaaaaagaataaaatctttataaacgttagagcaggtcgaaacgtggggacgacagccactctcgcagcgtcagatctaggcaactttcgtcattggctccactatgcgaaactttcaaactgttgttcaggtcactctcagagggcagttgctcatttcattggatccgagcgccacttcattcacataagcaacactgtaattccattctggtttgatttcagaaattctaccagctgtgtctagaattgtgtttacgaagaaaagttgatattaatataaatgacattttcttttcttgtcttttgcttaagaaacttcaaaaaaaaatccaaccaggcgggtacagtggctcacgcctgtaatcctagcactttgggaggccgaggcgggcggatcacgagatcaggagatcaagaccatcctggctaacatggtgaaaccccgtctctactaaaaatacaaaaaattagcccggcgtggtggcgggcgcctgtagtcccagctactcgggaggctgaggcaggagaatggtgtgaacccgggaggcggagcttgcagtgagccgacatcgtgccactgcactccagcctgggcgacagagcgagactccatctcaaaaaaaaatcccaaccgaaacagatgttgggcttgtgagaacgcagcactaggaagcgactcgggagcctatcggcacatgctggttattgctgaaggacgcgggaaaatgagctgacactcgggaagaaagccgctcctttgagcagcagcaagagactaagtccccctccttccgcccaagtggcagaggcgtccaggcgggtgccagcctcagcctctcactgggtcaggagcccagcacagggcacacccaggtagggagcctcacatctgggctcacacccacagccctgctctgcccccctgtaacccaccatctggcccatccctcaagacatcttccacccctacctcccattcatcacctgttacccagatggctgggctgtgtctccttgaacgaaactgggtcccaggagggtgagctccttcctgtctcccccagcccagagctgagcccagcttcatccatggtggtcaagccagagagctctgctgtctccccacctccgcagcaacacaggcccccctctgggtggccaaaaggtgtggctctaagccctccatttccagatcgtccatgattgctcttctatgcctcgtttagtgaaggccaaatatggaatttccaagtcgcctaaggtcaagataatgccagaccatgaccatgcagatgcctgaaatgtctgtatttaattaacgctggaggcaaaaaggtcactggtattaatggagtgaagaaaaaacaacccgcccccaggcctccagaatgtctccctgccagggagacagcagcctctgccaattaaaactcctcttcagaagcgtccagcacccaccaacttcagaaaacctgtgaaggcagagacaggcagctggcttgctggtggttggaaggggcccagcagggcttagggacactctgcccagacagaccacgcaaagcctcctaccagggaaggccacgatcacttccccctttgaaaatcccaagctcttccaacatactgcatccgggtaccctgaggctgggagggacctcggagatgggcctgccccgggctgcaaagcacagagaaggaaactgaggccgggcgggcacaggttgatctagtgtcaccggcagccgacagggtggccagaggggctccaaggctgagtccagcgctttctccacaacgccagaccctcaacagaaagagactttttagggcggatgtggtggttcacacctgtaatcccagcactttgggaggctgaggtgggcggatcacctgacatcaggagttcaagaccagcctggccaacatggcaaaaccttgtctctactaaaaaaaaaatacaaaaatcagccaggcgtggtggcaggtgcctgtaatcccacctactcaggaggctgaggcaggagaatcacttgaacccagaaggcagagattgcagtgagccgagatcgtgccactgtactccagcctgggcgacacagcgagactctgcctcaaaaaaataaaaaataaataaaaagatcatttttaatcccctcaactggtatttaaaatcatcagttgaatggcgaggtagctggactttttatgtggtgcccggggaagcttccaggcctcatgaggccaggcctgagctggtgctgtggctctcctggcaggttcccctggtcagagccaccacaggccgtgtcggatccagggaggatgcagaccctgcctttttttttttttttttttttttttgagacggagtctcgctgtctcccaggctggagttcagtggcgcaatctcggctcactgcaagctccgcctccagggttctcaccattctcctgcctcagcctccccaatagctgggactacaggcacccgccaccacgcccggctaattttttgtatttttagtggcgatggggtttcaccacgttagccaggatggtctcgatctcctgacctcgtgatccgcccgcctcggcctcccaaagtgctgggattacaggcgtgagccaccgcgccaggcccagacccttcctcttgatgagaggaatcacagagagtttgtgggtatctttagtctgcctcagggtccccatcacaaacgcggaataacaatgtctcttccaaggcccaggaggagacgacctgaggagacccatggggagctgggactcctcaggccgggtgcagtggttcatacctgtaaccccagcactttgggaggccgaggtgagtggatcactcgagcccaggagtttgagaccagtcttggcaacatagtgagaccccaactctaccaaaaatttaatatattttatttatttatttatgagatggggtctcgctctgtcacccaggctggagtcctatagcacgatctgagctcaccgcaatctctgcctcctgggttcaagcgattctcatgccttagcctcccaagtagcaagaagctgggattacaggcacctgccaccatacccagctaatttttgtagtagagaccgcgtttcaccacgttgactaggctggtctcgaactcctgacctcaggcgatccacccacctcggcctcccaaagtgctgggattacatgcatgagccaccatgcctggcctctaccaaaaatttaaaaattagctgggtgtgccgggcgtggtggctcatgcctgtaatcccagcactttgggaggccgaggcgggtggatcacgaggtcaggaggtcgagaccatcctgactaacacagtgaaaccccatctctactaaaagtacaaaaaattaactgggcgtggtggcgggcacccgtagtcccagctacttgggaggctgaggcaggagaatggcgtgaacccgggaggcggagcttgcagtgagccgagattgcaccactgcactccagcctgggcgacagagcaagactccatctcaaaaaaaataaataaataaataaataaaaatagctgggcatagtggcacatgcctgtggtcccagctactcgggaggcgaaggcaggaaggatcactggaacccacagatcaaggctgcaatgagccacgattacaccactgcactccagcctgggtgacagagtaagaccctgtctcaaaaaaaccaaagaagaaagaaagaaaagaaaagtaaaaccatggacccattttaggaacatttcatgaaaaaagccactcctgaggccccctggtaatactggggctcagaaaacactccaacatgaaggccctcctgtcactagttccattctcccctggagctggccatagaaactagaatgcctcttcccccaagcaggtcttagaaaccagaacccctttcccctaaagccagtcatcaaacctaaaaataatactctaactgtccctccaccctatctgtataaaaactggccataaagaaattccctgacctaccttgtttgactgtaggtcataagacccaccattccagagagggtcctgccccacacccagaaggaaggggcgcggctcagagaggccagtaagaatccaggctcatctgcctgcccatgctttgtggaacttgcacataaaaatgagcaatttcccctatctttgggactttatttagaatgttcccctgtataaatgttcaatcgccttgccttttctccaattaatcaatctacctcctgtcttgatttatttatttatttatttatttatttatttatttatttatgtatttttgagacagggtcttgctctgtcgcccaggctagagtgcagtggcaggatctcaactcactgcaacctccgcctcccgggttcgtgcaattctcctgtctcagctcccccgagaagctgggattacaggtgcgtgtcatcacgcccggctaatttttgtatttttagtagagacggggtttcaccgttttggccaggctggtctccaactcctgacctcaggtgatctgcccgcctcagcctcccaaagtgctgatatcataggcatgagccaccgtgcccagcctctcctgtctgattttccagtgaaccttaagggggccaagggccttagccccaacactctcaactgatattgaaaaccatggcccagttttaggaacatttcatgtaaaagcaccactccgggggcccagtggtcacaatggcgaccatttattgggcgcttgccattcaacaggccggctacccactccccacgggtctcctcagatcgtctcctcccgagcctcagaagaggcatggttattccccgtttgtgacagggaccctgaggcagagtaaagatggctgcacactctctgagactcctcccatcaagaggcagggtctgtgtcctccccggatccagcatggcctgtggtggctctgaccaggggagcctgtcgggagagccatggcaccacctcgagcctggtctcatgaggcctagaagcttccgtgggtgccacataaaaaagtccaactaccttgccagagagcccacatggggaggctggccctgagccgcaggggcctctcctgccctccagcaagggcccggagctgccctgaggggctcctgccggcccggcctggtgactctacctaggtctgtaggcactgggctgggcccatccctcctggggtatttatttcccccactgttctgacaccaggccctcccgtaagcacagacagccctgctgtccctgactctggaaccccagcgcccactgccacattctaccttttcccaggagacgggccgatggggtcagtggcaatgtgccaccaccatcggagggggctgggggtggggaggacagctgcgctccagaggccaaaggagatgggccgacgtccctaccatgcacctcctcctaccacacatctctgcctgccttagtggtctgcacgtcaggagactctgtggatgctccgagcctccatgtcctacaggtcagaccagaacctcccacccccacctctctgggccaaaagtgacacagtttcgtcaggaccatggagatcacagacttggacccaggaagacccaatttaaggccaggcccatcagctccccctgcaattggcctccctgagacccaacttcattgtctatacactgggataggaacgggcatctgcgtcggacgtgtgaggaccacgcaggacaatccacacaacatgcacagggcctgggacatgtcagaagcctctgctgcaggacacaggacacctggccccacgaaggcagagccctctgaatttgaccaaacctcctccatgcagacacggctgcggccttggggctaccacatccccagatttgcggagcctgaaatgcggccagcactggaagcggggagactcccacattgagatgtttctgttctcccagagctccagtagagaaaatgttcacccacaaaccccccagggtatccagaggccaggggtgctggggtgcaggctgcagacaggttcccacatttggtgcaggggaagacacacatctgctcaaaagaaaaatgagggagtgtttcgggttgaactgtgtcccctcaaaaaagatacataggggtgctaatccccaggacctcagaatttaaccttacttgtacagagacttcaaagagaaatcaagttaaaatgttgtcactggggtgggacctaatccaatatgacccgtgtccttataaaaagaggaagtttgccaggcgcaatggctcacgcctgtaaccccagcactttgggaggccaagacaggtggatggatcacttgaggtcaggagttcaagaccagcctggccaacgtggtaaaaccccatctctactaaaaatacaaaattagctgggtgtggtgatgcacacctgtaatcccagctactagggaggctaaggcaagagaatcacttgaacccgggaagtagaggttgtagtgagccaagatcaggccactgcactccagcctgggcaacaagagcgaaaccctgccccaggaaaaaaaaaaaaaaaaaagaggtagtttggacacagagataggcacagaggaaagacgacaagaatacaaaaagagaagacgccgtctgcaagcccaggagagtgccccgggacacagtctccctgtgccccagaaggcaccagccccgccgccaccctgatctcagacttccagcctcatttcggttccagtacatttcggtggtttcacagggctccttccctccccgctgcactgtccctcgggccccttcctctaccccacgctgggtggtgctcccggctcagggtcccatgcccaccctgcaccgggattccctctgtgagggcgtgccaggtctgccccatcccctggagccccacatcaggctcaaaagacaggggctgaaacaacaatcccgggagatgtgacggccacatcacctgccagtcaggagaggttttgtatcacttagaaaatatgggggtgggggctgcacacaagccttttctggggttctcaggacacaaagtcggacatggcctcagccagcctcgggtccggtggctcacagaggctcacctggttttgaaccataaagaaatttagcaaaggtctacccctgctcctagggctctgatctcacaagcgtgggcgtcactgaaaaacagcgtcagaaaaaattctcaacagggggatgctggcgagggaaaaggggtccctggagggcagaaaaatccacttcgtcaggtccacactgagacccggagagggctcggggaggcagagaccctgagcttgaaagccaggggaagagtttgaagaaacccatttcacacactgagtaaaaaagggcaacttacaagaacatgttattttcatgtttttaaagatgtaaacgattgagcaaattaaatatttaagtaaatgttgaactacttcatctatccctaaaagcttataaaatcatgttgaccaagaaacttaaaatcctcttactgggaaaggggtggaaccagcttgtattttgagctgcttcctatccgggtaaattctgtgccccaaatcacagatgagcgaatggggctccagcccgtgtcctggtgggccggctccagcccaagcgccaggctctcccccagagctccgcattctaaagggaaccactctgccacacacagctttgttcttctgggagacccctctagagaactgaagagcaaatgctatttctagacgctctaagacattaaaaagacacagaagaatcccaagtcctccctttcaaaacctcaatgcatctaatataccaataaaagcgaccatcaacgcctcactttctgagttcatgtcctccagggtcccgtgaaattcaaaccaggaagcacccggaatcactcccagacgaccacgtggaattcgatgagtgagcaggctcaggacggcaaatgcacttgcaggaaagcagcccctgcaacaaagcacgtgtccagccgagcccaaacgtgggcaccaggcacgtgggcacaggcatgcaggcatgcagcacaccctctcccagtggagtcggacgacatgcccgctgctcccaggacacagcaaccggccacggggccgtcgggtgccaggtgtgcagccagggctccgtcctccccgcaagcttctcaatgcaccactactgtccaagctgctgagtcagtgctgagggccccgtgaagctcacctccccaagaaggccccagagtaccggggtgtgaacagaagccctctctgggcctctaggcacaaaatactctttcgcctgagtaaatgatggtgtttttggccctcgtccaccatacagggccacagcaccagcactgctgcactgggcagtcagacttggggccctggcagggaggggatgcagggagcgcttgggacactggtgaagggagagggtgcatcttgtggcttgggcagtgccacgggcagcaccacacgtggaggcttctcccagggcggggggctctgagcagctgccctgtgcaaagtcactcaccaagccctggcccacacttcacagcaccacagccagaacagtggctcagccgggcgcggtggctcacgcctgtaatcccagcacttcggaaggccaaggcgggtggatcacctgaggtcaggagttcgagaccagcctggccaacacggtgaaaccccatctctactaaaaaaaaaaatacaaaaaattagccgggcgtggtggcgggcacctgtagtcccagctactcgggaggctgaggcaggagaatggtgtgaacccaggaggcagagcttgcagtgagccaagattgtgccactgcactccagcctgggtgacagagtgaaactgtctcaaaaaaaaaaaaaaaaagaaacaaaagaagaagaacagcagctctgggtcagggaggggcctaccaaggacatgatgccatcctgagcccaacatgcccatcccttctccccagctccagctgcctaggccctgccgactgccattgcccttccttcctgccagcctggagactgaagcagcacagaaatgacctggaagaccctcagggccctgtgacatctggggagctgatggacaatggggcctgaagaccagccctggggggtagccacctctgtagtggatcactggggctgcagcacagatgaggctcctatagctgggcgaggtgactcacacgcctgtaatcccagcactttgggaggccgagacaggaggatcacttgagcccaagagttcaagaccagcctgggtaacgtggcgaaaccccatctctacaaaaaaaaatacagaaattagccgggcgtggtggtacacaactgtaatcccagctacttgggaggctgaggtaggaggatctcttgagcctgggcggtagaggctgtagtgagccatgatcgcgccactgaatccagcctgggcaacagagtgagaccctgtctcaaaatatacaaaaaaagaaagaggttcctacaaggaaactgcctgacccttagaccttccagacggtaagtctggaggtatcggcagtccccagtgtggcgtggatcccaaaagctacaggtgctggcccctccatggcctggggctctgtggggaccttcaaacatccctgcacacatcaccgtgtgcctgcactatctgccagggtcaaaatgcccaagacagtgatggaaacgcagggctgttttccacgaggggacctctattaaacgcagccacatctcccagtgtgggaggaatcgtggtgttgacaatgtgagccatgtcatttgcccctcctgctccaaatgcaagttctaggcccatcacagtcctccggggagccgcccccgccctgcccactcgccccactgacagctcagactgcaccaagcaggaaggctgcagagagccagccaggacccccagcttcaatcctgcaaggacgtgggagccactgggcccgatcagccggcaatgaaaccaggtccatgaaaacactgatgagaccatggttgggcggagcctcaaggcacccctgaggccaagagactgaccccacaccctggacctctgcacacaaaactggaatccacatctccccaagtcacccatgacctcacgccgcagaacctggcacagctcacaagtcagaaccacagacacaaaacccagtggcgcctggagagctgggggcagcggggtccctgcggagccaggctctgggtcctcagccctcccttctgacgtgcggagacccatggctctacaccgggggccactcaagtcactgcagctgagacactttggggaccctcgccccgtcccatcccttcacaacagacagacatagagacctgcaggagcagggaccctggcctgccactgggcccagcgagcccctccgtgagtgatggccgctatgctgctcggccccctcaggcctgcctcagcctggctggccggcggcggggggagggacaaggacctggtgtggccctctggtgtccacactctcttgtccatacctccttcagccaaggccccaaacatgttgccaagagcagtgacgacagggagatggctgccggtgccagcccacgctgggcacacagacacatgcggccccagcacctcaaattcatcctcgctccctacagaccatcgaacccagcaagccctgccctgcccaggccaacaagcccaccaggccagctcagagccctcaggccacaccagaggaaggccactgctccccaaggcccctcccggatgccggtcactccatcccatcacggttcaagcccaggccgatcctggctggcacttgtccctcatacaaaagacagaaggaacctcacagccacgccccagctgaccttggtggcctggagacagaatcaggagaaagctctttaatccagctggttcagcaaacccaggagactagctcctcggctgactaactttaagctccaccacgttggaaagccccctgggagatgttttaggggatgggagaaggcctcgctggaatcaaaactgatttatggactctggaggggacgctgacatttcctagatccaccgccatcctcgtaaatcaattcccactctccgctcggctcgggccatgccagcctttgtaaagaaatgccaagcctaatgagttttgaaacaaccaggctgaaagtaacaaagagaatgccagtcattggcagtccaactgcagtggcacagacggcacagtggggagagccgggggcgcccctcccaccccaccccctttcctttaccgccctcccccagagagtggagggagggcctggggcacccctcccaccatgccccccttccttcaccaccctcccccagagagtggagggtctgaaggcgcccctcccaccccaccccccttccttctctgccttcccccagagagtggagggagggtctgaaggcgcccctcccaccccacgccccctaccttctctgccttcccccagagagtggagggagggtctgggggcacccctcccaccaagccccccttccttcactggccccccaaagagtggaactgggtggaggctaaagtgaggggtagccctcccctttgaagtggcaccatagtccttgcggccacttaaagcatgagctccaaggggccaggagatgggcggagatggggtgagcctggacccgcagcaggaaaagacagagggaaaatgccaccctagaaactgagacttcgttccccagcattgccacacccaaagctgaaaccccccatgcgaggccagtgggcaccctgtccttccccagtgggggccctcggtcactcaacctcacaccctcttcccctggaaatctcccctcacctctcagacctttccctgatgcccccaagccagacaaggacccgccccccaactgcagtgaccaccccaacctggtgtccacccccagcccatcctaggcccccacagcaccacctggtacacaaaggcaccctgcaccaagcccagagcttccttggaagtctggaatctttgaacctaacggcccaggaagactcagggagtggaaggcagcaggctgtagtgggtctgcgcctccactatgggaaccgctgggagggcgtccccacgcccttgccagcgctgcacccctctgaggcagacgcagctacaaaccaggtgccaggagcaggccccctcgggagcggacttccaaccgcttgcctggtttggttttgcagcccctgcagttctgaaaatgtgtggggacccaggcacccacaatctggtgagggcaaggccattgtgggcccagtgggcatgcaggcagctgcgctcccagaatctccacacagaactcacaccttccactaaaaggggcagggacccacgaggaatgattgggaatgaacctgatccggtaagaacatcgaactcaaaaagaaattaactttgaattacaaaactgcaaagtagggacccaactccaggcacccctagcaatcgcgaggaaggatggatttggctggcccagcctggcagaggaagcatttgatgaagatggttattgactcattccgagaactgtctcccggtggagacaaatctggacatggggaggttgggctgggtgttttggtctcattgcctcctcagaaggggggtgaagatgtgagcggcctcccccaagtccctggcctggaagccactcacagagctgagtttgagtcctggagctcagcaggaggttcaaaactcagttctcgcactgctaactgtgggagcaactaacaatctctctctgcctctgtttctccatctgcaaaatggatcagggtaggtcaactactgcagcaaacaaagcctggagctaaataccatccagctatgggccccacctcaatgagccacacagagtgctcagaacagcgcctagcacaaatctgtgcccactgcaggttcgcgaggatggaaggctgtgccatccacaagagatagccagcggctatctcttcctccttgtcactgacaacatgaacgcagagcttgcagactagatggtccgactgggcaaagagggggagacagccttacagaagatggcagacacacggtgtgtgaggccggaagaaacactctgccctgagactcctctcctctatttggaaactgcgcctgaggattgtattaatatttccattgattaacatgccctcttacatcccaaaacacatgcattaacttcagattctttatgtgtgccaagaaggatgagcctgccactcactctctgtccttcgcttggctgctcacagggcaagggcagggctgggggcctcccatcctccatcctcccctgcatccttaccagctatgctagcactccatcagacagccccccacgagccacacgagctatgccaggccatgtgactagaatctggccaataaagaggaattaacacagtgactggagcttctgaaaagtcggcttcaatgaatcagcttcccccaccccagccctctctattgcctagaatgaagaagtgatggctggagctcttgcagccattgtgaaccatgaccatgaggatggaagaggtagaacaagaagctgggtgcacctgggtccctgagactatggcaccgtcacccctattctagactgcctacctgcaaccctccaagacgaacaaaccctggtgagtttcggctcctgatgtactggggtttttgttagaagcagtcaagcctactctaactggcgcaagctgcgagttcagaccttccagatggaggcactggactgaagggggcaccgtgcggtgggctctctcatgtaaccggcaccaagcccatttgacagatgaggtgccaaggttcagtgagtcacttccccagagtcacacagctagaaaatcagggacagaaggctgggcgcggtggctcacacctgtaatcccagcactttgggaggctgaggccggcggatcacgaggtcaggagatcaagaccatcctggctaacacggtgaaaccccgactctactaaaaaaaaaaaaaaaaaattacaaaaacttagccgagcgtggtggcgggcgcctgtagtcccagctactcgggaggctgaggcaggagaatggcgtgaacccgggaggtggagcttgcagtgagccgagattgcaccactgcaccccagcctgggcgacagagcgagactcggtctcaaaaaaaaaaaaaagaaaaagaaaaagaaaactggggacagaaatgcagtcagagttgtctgcactggtacagaggcgggcacgggagtctaacacagtcccgcagaccgcaagcccatcccagcacaccgtgtttgtctatgggtcacggcagtgatgggacagagccagagatgaagctacagctgggagcgccgtggcctcctgagcaccccagctcctggccaggctacatgggctgcaggaagcagggccgggcacgccccttcttgggagcacaggtctgatctctacagtttcatatttaccgaaaggaatgtattcacgcgtgcactggggaccggaagcacatttttaataaaaactaaaaaggaaagagcctgcctcactcactaagcaagtcccaccaggaacacacccgttccccagcccttcgccctggagcgtgctgcccgggagaactttctgtgaagagagaaacgccgtgtctgtgctgcggatgcctgggccgccagccacacacagcctgcacacgtgaaatgcggctggtgagactaagaccttgacgttcaactgcattgaatttaccagacctgtattaaatttaccatacctctatggaggtatgatccacagacgataagctgcacaccctccagagagtgtcatgtccttatttttacatatgtacacacccgtgacactgtcaacacagtcaagacggtgaacatattcaccggccccaaaatgttttctagtgcccactggtgaccccccactgtatggccagtgtcactcctgaggcctaagtcagggtggcaggcactttagctgtgcatcaggtaactcgtctttcctgctcccccatcaacctcctgacctctgcatcacacacacactaaagacgccatgtccaaaagtaagcgcattaaacaaggtccgcctgggcggggagggctgctcgtcagcacaggccttcagcaagagcctcagggatgccagttaccaaccacacaccgaatgtcctccaaacccactctcacgtggcccagagccccacaggtcaggattgcccaggccaagaaagtaagtcagattttctttttttttatttccaacttttaagttcaggggtacacgtgcaggatgtgcaggtgtgttccataggtaaacgtgtgccatgctggattgctgcacagagcatcccatcacctaggtattaggcctggcatccattagctatctttcctgatctcctccctgccctccaaagatggctgattttcaaagatggggtgtcagctgagctcaggacagccaccagctcccgctggtgaacttagatcagctgcggctacagtcccggcctccaacacacgtgggagaagggctgacaaccaggagtgttttagtacaaaacagacaaaccagaaacctacggcatcaggacaccgtcaccggaggatggtccaagaaggcgggaaggccttccaggtctgggaacatgagacccgggctgaacacgaggctatgtccgtccaaatccccacagtcctgccacacaaacgagccggaggcttctggaggacagtgtgcctagatgaaggaaccaggacgcagtggcgcttttccatctgtaccccaacatgtcagggtatatcaacacccatatgtcactggtgctgggtccgagcatgggagctgcagccaaattctgggggtgggggcacacggggagaggttcctgcaccctaacgtgttgcttctctgcccatttcaatcgcggaacacaaattacacgtgtgatgctcttctccacgtgtgcacagcactcccgaggcgctcccaagctgtcaggcagccatcctcaggggctgcagtcaccggtggttgactattaggggggatagttgtgttcttttatttctgcactaagctaataagtacttgttcagcccctctaaaatcacaatcgtcctgtcctcgttccgtccctctaaaatcagagtcgtcctgtgagccagtgaccactcgtcccaaacatagcttctattcatcagaatcagggctcctgatcctggtgactttaaggaggaaaatccaacttcagccagcacagtccacgggcggtggagtgccatttggaaccgggtttgggaggcaggcactgtcctctgaaggcccagcctgaccctgcacacccagggctgttcgcagaccgtgcaaacctcacctcacttccaagacaaacgtcagctttgggtggagccctttgccccctcttcctctccagggagctggcactctgagaggggcgcccccaacacccacctctggtgagacaatgtcccagagcccagtgttttggtgactctgggctggaacaccccctgtgctcccaaacaacggctcatagctggcgccacggcccccatgagaaggacgataaaaacacgcgttgccaccacacagaacgggagacacacacgaaaggtaagacaggaaggtgggaacgatcgcaggcaccagccacctggcagtcagcacagaagggacctcactacaccagcgagaagaagaaaccaaagtccttgtcaggggtggtgcgcgcttcctggtgccccactccggaggcttctatgccagggatgccaatcagaatcttcaagggcggtttctccaaaaagtgcagaaatgaccgatcctttgccccatctgcccttggtaaaaaaccaaaggcagagcctgcgcacatggtcccaggaggcgggggaccggacgcgcacacagtaggtgcacaatcgacactcatcacggaacctgccagttttctgaagacctacagggagggggcaaagtcagggcaaacagcagggccacgactgagaactcccaaccccatggagatgctcagatgccaggccttgggcaccgcgcccaggtcagtgagcctcggggccggctgtacgctcgtgggagctgacactgccattgggggcagccatggtgggatattcgggaagcaggtgagcaaaggaggagcaggaggtggagcccgcagcagacagaggcccagcaatgccagcctggctgtcctcagccactcccccagactctgcctcccacctccctggagctcttcgaaggggtttctgtttggtccccactccaagagccgctggctatgacttaacattatcctgaaacgtaaaccaacaagcaaccaaagacgatgctcaccgcaaacccctgagaccctaagccccaggaggtgccctggacagtccagctcagtcagaaaggccagcctccaaacccagcatgggctgcctggggcttcgagacagatgtgtctcacagcgggctaagcacacatcagaaaaggcagcactcactgggccagacacagaattaccgtgaagcccagcaatcccgctcctgggtatgtacccaacaggatgggaagacaggtgttcagaaatgcaccgggacacgaatgtccccagcagtgatcttcacagtggccaagaaatgtagacaccccaaatgttcatcagcagacggatggataaacaaaacgtggtctacctggaccgtggaatattcttcagccagaagaaggaacgaagcgctgacttagtgagcctggaggacaccacactcaggggaagatgcagactcaaagggcgcgcagcgtgtgactctggtgaccaagggcagtggggatggggtgggggtgacggctgccaagggatgggatttctgctgtgtgtattcctaccaccagagagagagaggagggggagaggaggggaggaagcaggaagcaggggaggggggaggggaggaagcaagggatgggggagggaagcgggaggggaaggagaggggagggatcacgggagggggaggagagggaaggggaggggagaggagaggaggggaggaggggacgggaggggagaggaggaggagaggggaagggagaaggggaggggaggggagaggttggcattcacttctctatctctgttgccgtcccacagctccacaaagtggagagggaggtttgggactttggaacaggtgaatgtgaccaaggtcaccggtccactcagcgccacaccagtgctgggccaagcggcatcaaacccaggacagctcgcacggggggaaggacctgggagggagcagggaagcacgggtgctgtgtctgggaatcttgaaaacaccaaggagtgctttgaaacaggccgcttggccggaagagcaccggcctgttctccattagtgtccccttttcctggctcagggagttcacacccactttctgacgccttgactctagtcctcattggctctggggacatcagggaattctccatggtggggcagagtggggacatccacagctggaagccacagtcagcccccacaccaccgtcccgccctccttgtgatcacgtggtttcacgactacactttttgaattcccggcagccaccatccacacccctcaacctgatattttcaaggggattcagcacgatctggcgttctacagactccacctgccaacggccagctgactttctcccaaggagcacaggtggtgcaatgaggaagtctctactgaaaaaaatgccggacaaggggctgtgcccactttacaaagcaccctgaaaacaggagccctcactgggccccttgtctccatggagaagacccctagaaaaactggtgccagtctcaaagacaaggcgcacacacacacactcccacacaatgcacacataatgcacatgtgcacacgcacacgatgtacatgtacacgacgcacacatgcacacacacacaatgcacacgtgcacacacaatgcacagacgcacacgatgtacatgtacacacaacgcacacatacacacacgatgcacacatacacacaatgcacacacgcacacgatgtacatgtacacacgatgcacacatgcactcacacacgcacacgtgcacacacaacgcacacacacacgatgtacatgtacacgcgacccacacatgcacactcacacacgatgcacacgtgcacacacaatgcacacatgcacacgatgtacatgtacacacgatgcacacacgtacacatacacactcacacgatgcacacatgatatacatgtgcacacatgcacggaatgcacacaaggcacccatgcacactcacacacaatgcacatgcacacaagatacacacgtgcacacacgcaccttcccttctgaaggaagcctggcaggaaacgggcacaggccacggctgctcccccagggagaatggagggaaggaggggctttgctcaaacacgcctctctgctcctagccagcggggttatccaaggctccatggaggaggcggacaggcaacaccgagctgggcttggtcccactcgataagaaggaagaaaggcgcaagatgaattgcccgcggagcctgtgacttgcgctgaatgctaactgacagtgattcacttggaaagtttctctccacgggataaagccctctttgtagaaagggaaggtggtgggtgccaacgagggcccgggcgcacaggcccaggactaacaaaagcgtcggcgtcaccatcccagagcctggctctctgccaccctgggaagtgctgggactcttgctgggaagctgggcagtttgaggatgtggggctgggtgagtgggggtctcactggtgatatggatggagaaggggaaaggagggggtgaacagagaaagggagagagaagagccgggagtgcctgtgtattgatcccagaagctgagctggaagaaagagttggctagaggctcacggctgggcctccaggaccagcacaactttgtcggttcccctgcaaaggacaccccggatgcctccagccatgcaaaaagcattaattaagtaccttctgaatgcagatgttgggactgtttaggtcaaggggtgtgaaggaagatgctggcatggcagagttgaagagaatgtcccggctctgccattgtctgtgtgacccatggccactcacccaaccccctctaagcctcagcgtccccgtccatcaaatgtgaggattaaatgagacacatacaaagaaacccggagctttgggaacactcagcaaggactaataaggacgaggttgccactctcacggggtcctgtcccctgtacatcccaccctgggttttcctctttctctactgcaaatctctttgcacaaaagcccacccagcaggccccagacctgctccccacccagaggcctatgacagcctagccctagagctcactaaatcatctcccttccctgaggggccctatccccgtcctcctcttccaggggccaagttctttacctgttcctgatgtgaacccattttcaggagaggaggtgacaaactcagcactcaaaaggcaatggtggagcccaatggattacctacgccgacagggacaaactctcaagtcaaaggaatgattctctaatggtggaatgtcaagctgaatattttttgacttaacagagagctgggaacccatcatgagaaaaacagaaaactctttctttttttttttttttggctagaagggttttatttgtttatcgtttctagtaagtcacaaagacgcataacctccaaagggaaaacttatgccactgaaaatgtcaacacagcacagaggggccctgcccatcccacagaggccatgcagttgggactttgcctaccccctctgggcctcactccctgtcctagcctgcctgagagagtgccatcctcccctttattgacggggaaaccaaggcttagggaggaaagcgactggcccaggccgggcatccagttgaaggactaagctggtcccatctgacactgacctatgctgggcccccaaggacaggaccgaacagatcccagagagagaaccctgtggacagaaaaggctagctggacccacaccctcccgagggagaccaggacagtgggagagagaactgacgcagcctcctggagaccctggtcccccgccctggtccccccaccctcccggctgaatccccagccccctaagccccggcccatcgccacttccacgagcacaactcccagattctccttcactgacctccttccacaggaggtcagcaatttctcatttccctgcttcaccaactccattttccaaagtgattgagactctaacaccattaaacatgatttaatttgcttttcctaatgatatgcccacagtattaggacagctctccttttccacttgaaaggcatctcagggtggtttcctccagtgacattaatagggaaaccgtcggaaatgctaaagaggactcggtgcctccagctcggctagaaactatttttaaacaaaggagcgcactctctgcggcggcagaaaagcgaaccagagagcaggaaggcggcgctggctccgagccttgtgtctgcatttcccgcactttcatctgctggtccggacccaggcccagctgctagcccgggctaccaccaccaccaggaaacactcagaaacccaggccaggggccctggaaaggcggcagactccttctcggtggcacccattgtaagagtcagcctggaatctctgagccccaactagtgccaggacagtgccaagtccttcacggcagctcattcgttcctgcctcacaactccacgtggctgatactgttatgtccatttcgtgggtaagaaagctgaggcccacagagtcatgtagcatgcccgaggtcgcgcctttaataaacacacaggcagacctcaaatccaggcccatctgagtccaaaagtcccattctcaacccctgggctcctaagcctcccaagaagcagccgccatgtgtgtgtgtgtgtttgtttgtttgtttgtttgttttgagacagagtcttgttctgtcgcccaggctgaagtgcagtggtgcgatctcggctcactgcaacctccgcctcctgggttcaagcgattcccctacctcagcctcccaagtagctgggattacaggcgtgcaccaccacaccaggctaattttgtatttttagtagagacggggtttcaccatgttgtccaggctggtctcgaactcctgaccttgtgatcctcccacctcggcctcccaaagtgctgggattacaggtgagagctaccacccccggccgccaccatgtttttaaagacttccccacatcccatcctcacactttcttcactgacctagctccgccctctccatcaggcctggctctgcccacagcctctccacgcaccccctcactgctgtgccctggcacctctgacactccccaaccactgaaaggtaaaatcacaactgcctgctgtcctggaagcttctctggggctggcacctgagtttcacagcaatcctgctaagctggcacttgtgggaaaatagaggctcagaaaggctggagactcttagggccccaccgggctttgaaaccagatcctgggagctgcagaccataatctctgcttcactgggtggggcctcctcactggacagccctgggtgaggggttccaggagcccaggtgtcccggctcccagcccagggactcactgtcccccggggccaggtcggctggcaatttctaggctgttctaagccacgggtcaagggctgcccactcagcaagggaagccaccaggacaccgggtttttcctgaacattcctcccatcttgggagagaaaagatgctcagccacttttgccaccagctcaaatatttcagtctcagatcagagaggaatgtaagccggaaacagcgcagagagtggggccagatggacgtggccagtctcaggggagcaacacaaacagcgcattcttggcatccgtgaggcagagacatggaagatggaaggtccccgctgccccgactgtccctgccgccccggccacccctgcctcacccaccacccaaccgcatgtcctccgcggagcccagagtcagttctgctggacatacagcggcggacccaaggctgctttccacgttgcccagtcctgctctgccaggccccaggcatcagtcagcacctgttctctgcgctgagccacgtgccaggaggccagacaggcctgggcgtgggccccagtgtggaccccatcctccagctgcacggggaactgacaggtactccctcttaccgcacaccgagaaccaggcctcactcactcctgcacatgcagccagcagacagctcagcaggtagagggatctgccatcaaaggcagagctgagagcctccttctagtcagccccagaaaggcctagatggaggccaagggccaggagagagagtccgggctctgcctccagtccacaaagggccacgaagcagccctggccctcaccaggcctcagtgtccccactgcacagcagtgcaagacagctgagggcgcttttcgccagccatgtgagcacctgtgcctctccctgcaggctggggcaatccagggtggcttcatagaagaggcggtgctgggctggcccagaaccacaccactggatcactcactgaaagcccatggtcattaggcagaggtgtccagtgccccctccacctgcccagctggcctgggaggcctgagcactgaggtccctgaggccacatggaaaagcgtcgctgataccagcaggggaggtgccccctccccaggtgtccctccctctgagcgccccacagacccatccaggaccaggtcccgcccacccctaggccccgtcacacagaggaggcttggctcagctgctcggctcaaggcgggggatgctgtctgtcactgtctccccacagcaggccagtgctgggcaacatactggccgcctgctgctgcggctgcctgacgacacggggccgcacctccactagtgaaaggggccccaactgaggtccctgaaggtcatgtcccaggagtctccaagcaccctgaacatccccaaaagtctaactcatacccctcggcccacccgcttcctggctggccctgagtgccctccgtggggggccctgctatcgtgcgggatcagaaactctaattggggatatagctcataattagtctttgattaattaaaaaatgagaaaaccaattacttaataaatgtcgttggcttaatatgcataatctctgaagccgtgcagccctgagaggggaaggcaggctattcagaggagtccttggaggggagacggcgggggatacagagtcagcccacttccctccgcctgctgtctcagacaccagagagtccccaccagatgacagctctgtgcgtgccggagtgtgggctctgctcccttaccactccacccctgcacctggccatggcaggagcgccatgtttgctgaatgaatgaatgaacacatgagtgaatgaatggcttcttcttcagaccactgaacgtccacaggccaggtatggtggctcacatctgtcatctcagcacttcaggaggcagagatgggaggactgactggggccaggagaccagcctgggcaacacagcaagaccctatctctatttttcaaaaacagtaataaaaaaagaaagaaagttgtgtctcactcgaagaaacccagcttcccagtgcctctccctgcagcctctccctgtgcctctccctgcaggctggggaaagaaactctaattggggatatagttcataattagtctttgattaaaccatgtccctcataaggggttaatatccacaatatgtaaagaactcctacaataagcccagatacggcccaggccctgctcccctgaccaagtgctctcagcagcctctgcagtgtggaggggctcggccacacacaaggacccctagcctaagcaagtataagaaatcaaccgcggatgaacttgagtttcagcagagccccatccgtcatggaaacgaaccgtcacagtggttctaattgtgctggatgcgagtgtggttctgatcgtgatgggactggaagcgagggtggttctaatcccgttgatgggcagtagtcagcctgcttgcttcccggcaccggcagggcgagtgggccagctaatggcgcacgcacaggtgtgtttggctggtgcagacgccatgcatgcaggcacgggatgggccccgcctgctggaccccaagcccacgctgttagggggacccggacccggctccctctgctttgtttgccaggtggcagcgggaagcttctccagcccagtcttgggaggtggtggggcagcacccacctgctatgcctggctgggctaggagaaggaaccctgccctgcagaagtcctccctctggctctgtcatagccgtgaccccagagcgtctacctgcctgggcttcacatacccaggaaggggcttgacacccacggggaagcagatgtgcccagtggaccaaggggcctggtgatgatgatgccagagtggggcaatttaaatgtaggggcacggggcagaaaagagctgggcttggcggggcagccccttcacagtgagcagctgacctggtcatctgtgagcatttaccttcctgcccatcaggtgatggcttctggctgccaacccgcaggctgtatattatgaaccaaacacttgtcctcaggtacgtggctgagtgacttctcacaaagattccaaggccattcagtgggaaagaatcatcgttccaacacatggtgctgggaaaactggacagctatatgtaagaggatgcaggtggatccttatcttacaccatatacaaaaattaaattaaggcaaaatggatcaaagacctaaacataagagctaaaactataaaactcttagacaaaaacataggggaaaagtttcatgacattggatttgcaatcatttattgatataaccccacagcaccggcaacaaaaacgaaaacagacaaatgagactacatcagactctaaaacttctgcccagcaaaagaacttatccacagggtgaaaggcaatctactgaatagaagcaaatatttgcaaaccatgtctctcataaggggttaatatccacaatatgtaaagaactcctacaactcaacaacaacaaaatctgattttaaagtgggcaaaagacttgaatagatattcctccaaagatgatgtaaacctggtcaacaagcacatgaaaacatgctcaacatcactaatcattcggggatacaaagcaaaaccacaatgagcttcagacctaggcagaggacggctattaccaaacaaacaaaaagacacgtgttggtgaagatgtggagaaatgggagccccgctcacagctggtggtcatggaaaatggtgacgccactggggagaacagtacggagtttcctcaaaaaattagacatagaactactatgcgatatgatccaccaattccacttctgggtatatagccagaagaattcaaagcaatgcagccaacagacacatgagaaaatgctcatcgtcactggtcacgagagaaacgcaaatcaaaaccacaatgagataccatctcacaccagttagaatggtgatcattaaaaagtcaggaaacaatacatgctggagaggatgtggagaaataggaacgcttttacactgttggtgggagtgtaaattggttcaaccattgtggaagactgtggcgattcctcaaggatctagaactagaaataccatttgacccagccatcccattactgggtatatactcaaaggattataaatcatgctactataaagacacatgcacatgtatatttattgcggcactattcacaatagcaaggacttggaaccaacccaaatgtccaccaatgatagactggattaagaaaatgtggcacatatataccatggaatactatgcagccataaaaaaggatgagttcatgtcctttgcaaggacatggatgaagctggaaaccatcattctcagcaaactatcacaaagacagaaaaccaaacactgcatgttctcactcataggtgggaattgaacaatgagaacacttggacacagggcagggaacatcacatactgcagcctgtcggggggtgggggactaggggagggagagcattaggagaaatatctcatgtaaatgatgagttgatgggtgtagcaaaccaacaggcacatgtatacctatgtatcaaacctgcagattgtgcacatgtaccctaaaacttaaagtataatttttaaaaaaagaattcaaagcagggtcttgaaggcattatttatttttattttcatttttttgagacagtctcgctctgttgcccgggctggaagtgcagtggtatatctctgctcaccgcaacctccaattcccgggttcaagccatcctcctgccttagcctcccgagtagctggggtagactacagttatgcaccaccacacccagctaatttttgtatttttagtagagatggggttttgccatattggccaggctggtctcgaactcctggcctcaagtgatccactggcctcggcctcccaaagtgccgggattacaggcttgagccaccacagcgcctggcccttattatttgtgctacagttaacaatagcagtaatcacaacagcccccagcctcacctcatccacggctccaatctgtacactaagtcacctacactgcagcaggcctgcccctgagctcagacaagaacacgtccactaggaggccagtcaccaccagctcttccctcaagaggaacagccttcagggtccaaggggcaatgtcagctcctgggatcctcatggtgatggtctcctgagccctggaagggagggggcctatgggccagagggctcaggactaaatgaccatgaatattcacaggagccgaaggtgaaaacagcccagtgtccaccaacaggtgcatagatggacaagctgtggtcgatccaaacagtaaaatatgattcagtcacaaaaaggaatgacccactggcggcttccacagcgcaggtgaaacctgaaacttcacgctcagtgcaagaagccgacgctaaaggccacatattgtaggattccacttatatgaaatgtccagaacaggcaaatccacagaaacagaaaatgcattagtagttaccaggaactggtggatggggcaagaggaaatgggattttgtttcagggtgatgaaaaaattccagaacaagacagaggggatggttgtacaacactgggaatctgttcgatgctgctgaaatgcacactttaaaatggtaactcttatgttattttatcacaataattttttcttccccccaccggagacagggtctcgctctgttgcccagactggagtgcagtggcacaatcttgggacactgcaacctccgcctcccgggctcaagcaattcttctgcctcagcttcccaagtagctgggattacaggtgggtgccactacatcctgctaattttttgtatttttagtacagacggggtttcaccacgttgtccaagctggtcttaaactcctgagctcaggcaatccacctgcctcggcttcccaaagtgctgggattacaggcatgagccactgtacctggtcacagtaatgttttttaaagattgagaatcaaaaggatcacccagggctccagccccaaagtccccaggggcagagtggccaaggaatctgcatgtttcgccactgcccttgctgctggggatctgggaagcccagcaagttcacagccacacactttgtcattccagagccgctgccttccccagccctaagggcctgaccccacagctgatgcctggtaccaggctggccgcccactcctatctaccttcaaaaaaccagtactcctggagaaaggtcttccagggtgccaagaaatgacacttcgttataattaattacttacactttggtatttttttttcttttctccttcttggtctcatttggcttttttgctgcaaacatcaaattgtcaggctccaacagacacaattaatgtcttgggggcactggggagaaacaattaaccatttaaaacttaattaactgtggacatggaccaaaaaaaaaaaaaaaaaaaaaaaaaaaagcatgcaccagttgcaccaggaccagctaagaaaatgcaagctctcagccaacggggtggggactcacaggaaagagaagtgacaaagacccacccaagaggtcatccagccagtccaaccaaatggattgattcccagatggggaaactgaggcccagggagtagagcagtgaccagtccacgtacaatgagaaacaatggcagggcctgagcacacctcctctgctcctagtgcgtcctgaagcgtgggctgctgccaccactgccacccagaggcccctcttcccagagccaagtcctaagagggaagggagacaacaggtgggcatcactccccagggcgccagcccccggcagcccagcaggtgctaagttattattactaattccaacaacctggcttgcagctttagatcgtgggtctcccttctgaaaaccccaggatagcaccccaaatctctctggtagggctctctggcactgccctagctcctgcccctcccagtctcctactccaagcagacctcccttctaaacctgagcaggccaggccaccgccaccagcctctggacctttgcacatgctgcccctgagacctcccataccaccaccttcacctggtgaactgcagctcacatctcgaaccccagcacctcctccaggaagccctccttgactagctcaactgtctaacacacctctgcccaccaaagtccctgtcactctgcacagtaggcagtggcccctggctccctgtcttcccaggctccgatcatctgaggctgcatgtcctggcaccagctgagctaagcagagcacacagaagcagagaggaccaccctcctggcaacagccccactgtggagggatggggaggcccagcaccagccctggccacaactatagcaactccccaaacctcagccatctcagaaaaatcaatgcaattctgcaaacaccgggcagcctgtcacagacacccgcagcacttctgcaggtgcccacccagcatccagtccttgctttactcaggctgagtccccccctacacatgctcttatcaggacctaccttaccagtggtggcaagaacaaggcaggcttctggaaagcacccctcagctattgtgctctctcctctttctggggacacgaaacctgagaccagctagcccaggagtgggaaacccctggcacatgtacccatgctctcataccacacccacggcagacaacgctaatcaatggctgagcctcgggacccttctcagctgagccctccagtcagccactaccaatcgatcaggattaaccaagtcttcaattaggctcctacctccactgatgtagtaggcacagggaagagatgggaggccacccacggtcagagaacacagcagaggctcagcccagaggctcttgtcccgattccacggggcagtcttttcaacaaatagggctgggaaaactggatatccatgtgctaggtggcccgtggggcctggcattcactgaaacactgctcttgaggtcttggccacacacccacacccagcaccccaactcaccccctgcacccttgcctttctgtctggagttggccccactccaagcggcccccagatcctcccctctgcgtttatcactctggtttctattccttcacccctcagccttctataaaaagccaacagtaatgaccctcaagcaggtacaagttcccaacctggcaccacatttcctggcacaggagcaagaatccctacctcacaccactggcatggagatcaagggatccactcatgggccaaggccgctcccagagcttgaactcaggtcttgaaatcacagcctcctaggatcctgtgagcagggttgaggcaaagacccataggcttcctggcctggcgcgccaggctcagccacctcacatgaagcacagtgggctgagcctgacctccaggcacgcagctcatcagacctgtagggactcggctaccaaaattgaaccaccctccacccttgtccagtgtgaagttaatgacgggcatggctcccgcctggaaaggaaagcagagaaaaacctctcccatccccagttataaaacggcgggtcagcatccgatgggcttaccgactccgtgtgtgtgtgtgtgtgtgcgtgcatgtgtgtatgtctgtgtgtgtgcgtgcatgtgtgtgtctgtgcccatgtgcagcatatctggttgtcaagttcatctgaaagtgggtgggtgaataacgtcctgaaatgacaacaactagcagataaaagaggaaatgttttcaagcagaaactctgaaggcctttgccaacagcccctgcgccgggctctgccgggagcctgaggcagctccccaccccagcgaggagcgactgcattttaataagtaattagtgtggagtggatgctgctacaaagactagcacgtctcactgccagcattaaggcagggagtgcaaatgaactcaccgcagcattagcatctcagagtcatcagaccgactggcagaaaggcctcgggtgagcacagagtcttctgcactcagcaaattaatgaacaaatacgaagaggaaatgaacaaacacatgcagcctcggggcctgggtgtggagataaggggtgctggatcaataccccaaggttactgctgtgttctcccctggccagacagagcctgcgggacacattcatcaacgcagatgtaaaatggagaaatcaatgacatggctgagacggcatctggatacacttgtccagccccagacgcagggcaggtggatggtgggtgtggggcaggatacactggccgggtgaggctggcactccaggccactggaatggccatcagatgcacccctgcccactgccagggtcatcacccacgtgctcaaacgcggctggtacaatcacagcaccactcccaggagcttcctcacgagacccagcccatgaaaacaggcagcggcaccatctggaatctcccgcccacagccctcggcatgggggaggcaaatctttagacccattttacagatggggaaatgacagctgcgagacctgaagcaacctgtgggacaaactgggtcctgatgacggcctgatcctcggcatcacaacctgtccccagccctcaatggtgtcttcgtgggtccactctcacctggccccagaagcaccagcagtctcccacctgagccctcaagttcaagtccggacagtggtgggtgggtttgtggtgggggaaggggcaatggcaggggttgtggcaacaaccggggagcagatgggaagtccagggtgacaaactggggtcccccattgtgccagctcctggtgactgccaggtgctagggtgctggggtgctgtgctgacaggtgggaggtgccaggatggattcgaggtgcctgccctggctcaggtggatagagtgacagcacatgccaggaggttccacgggggtagggggacccaaggctgatagacaagggtcccaggcagaagaggagaggaatagaagtggtgagggaggggtcttactccagcaaggaggaagggcccctctgcctgcacgcaaaagccaaggggcctctcagctgctgacaaacccagggccagagggactgggatgaccacagctgcccgtccatcatctgcagcaggtgcacagccgactccctcatcctggacgtagtgatgcggcctgtccccaccaccagcgaccccagtggcctgtccccactgccagtgcccccagcggcctgtccccaccgccagtgtccccaggcccaactcaaaggaggcaggtttcctcagctgtgacggatcaatggtttccaactatgtttttaccctcttcagaaccctttttttaagcaaaatgtcagcaaaatgccacataaaaaacagataaaagtggagctattccgattcagcagggccctgccctcccttcctcctcccagcctcttgagaaggcccagagtggtctgagattctcagctgaagggaaccatccgtacctgcactgacgccgtcagcaccgacaccggtggtcattgcactgcatcctctatagactgctggtcagcgccctcccctccagggtcaggccttttacttcctctccccagacagccccaccggcctccactctgcctcctggcctcctctctgcctcccggcatcctcactgcctcccggcctcttcactaccctccctgcctccaccctgcctcctggcctcctcactccctcctggcatccacactgcctcccagcagccttgctgcctcctggcctcttcactaccctccctgcctccttgctgcctcctggcctccacactggctcctagcatcctcactgtcctccggcatcctcattgcctcttggcctcttcactgccacccggcctcctctctgcctcccggcatcctggccgtcttccgtgcgccttccatacagacaactgtgctgcgtgcaacagctgccttgctagtcagagggaagagggcacagccgagcagataaaaacggggcccctgtcatcagcaggacctgaggatgcccccagctccactgtaccgcagagcacacgtgagatgcatcttctctgtgcctgtttccttcctcacttcttaaggtccctgcagggtgcaggtgctcgtggacataaaggtccagtagccacaagtgattactcccgtggaggagggaggggcagcaggagaggccggcactcaggtgaccggtggtgtgcgtccagcgtcgccagctggcacttcagaatctgtaagcagccatggagccacccccagacagtgctgagagccagttttaactgcctcagaagtctctgagcctcccaaaatgctttaatgaataataaataggagaattaagcccgtttattggaaggtgcgcgctgctctttaactcgagcaagagaagcggcctagcgatttcctctgggaaggttcattccgccccgagtgaggctggagtgaagtgcactgcccagccagcaccgcgggttcctggggccaggcagggtggcctgggctgggacaccagagaagcagcatcagacttcactcggaaacctgtccccgcacagggcaaggtgccatcagggcaggccctgctgggccagagctgagtaagggcctgcaggagagcgggaaggcaccagcagctctggggagaaccttccaggcagggggcagccagagagcccagcagcaggaggggctgaagcagctccacagcagcgagggggagcaaggggcagggaccagggaggacagagctttccctctgacaaccagaagcacctgcgcccagggggcccccctcctgcaggcagggagcaccctgtgctgctcaggagaaacacgtccttccctcttcccttctcccctcctttcttccctcccttctgcccagctgccttccctgtcctctgcccagaagtgcagccctcacctcctgaacgagtctgtccctttgtcccctgacctagggtgcaagtgcacactgtcaatggcaactatccccacaaagggagagagcaacagcatcctcatcacgctctgctcaccccgctccagccctaacaaagagctgcctgtgacccggtgcccaggaggctctgatcaacaggggaagcgggaccactgtcctcacgtcacaggagaggacatcaggctcagggaaagccacctgcccagggccccgcgaaggagctggacggatcccaatgacaatgccatgaccaggcacctggggagggaggacagcgagggtttgaggacccaagaaactcacagccatgttaccgtgcaccagttgcttaggtggggataacacaggcgacaccacggcacatggtaaacagtcagtgcgctgccggggtgccttccttccctcccgcagacctgtgctcagtcccagctcgcaatgagatcagagtccctacggtcggaactatcatgatctgcagagtccagggaccagaatctcagaagcaagccacagaaaccccgcagcctcaccagaatcctccctccaaatgcccgaccggattccaagctggggcaaaccagcccctggaagaagccgccagagctggcgacccatgggcttctccacactccttcccagctgggcaactggacaaaccgcccagacacagggcacagaggaaaacaggaaaggatctacaggccgtggcggggagcagggccaacggctcccatcagcaagggctgcggactcacccttcacgctcggccataactcggccccagcacgcccaccccgggcagcacaggaagccggacacaacttatttgagccaaaacctaatctctttaatgcaaccctttgaaaaaaataccaggaaagcagccagaagagaaacacttccggaataaaccttctggatcctttagttcctactggaacttgcggggtgagtgaagaggaagaaaatgctaataaaaatgactaggacctgccgttcattttttcaccgagtcctttacagcaacacctccaaggggacagtctcaagcttcatttgatccctgcagaaacaaaggctcaacgagaccaagtatctacagagtccaactcgcgtccaggtctgacggaagctttgctctcacccgcctgcctcctccagggcccgcctggctccaccgagcctggatgagaggaggcaccagaaggcaggtgcagtggaccacctggcaggcttcccagggctccaaaacctggagggtttccaggggtccatctgcctgctgcccaggtctccccaggtggcaggggccaggagcagagggaaccaggctgactcatggtgggtcccctcccaatgctcctcctgggttaaggaaaccctctacacctgtcccaaagggaaggcagaagaaaaaacccaagggccagtgggcggagaccgcccttaagcagcaagtgagggccatgagcagggaaaacactggtcaaaccagcctccacatggggccatccctgggagagggagacagtctcattcacgttagtgtccctttaacacgtggaatgatcctttccatgataaaatcacagaggaaagactccagtgtccaaggctgattgtgggccagagccagcaggcctcggggccaaagctccagagtttttactttctcactcctctctcctaccattaattgctcagcagctaatctgagggtccctgtgagggcaaagactacgtgagtctcctcattttaactccagcatactaagtgcttactaaatacgtggtaaattatatgcttaacagaatgatagatggatgaatgaactaatgaatgggtggatgaatggtggatggatggatgaatggatgggtggatggatgaatggatgagtggatggatggatggatggatggtgaatggatggatgaatgatggacgaatggatgagtggatggatggatggatggtggatggatggatggatggtggatggatggacaaatggatgggtggaaggacgagtaaatgagtgggtggatggatggatggatgaatggacggatgggtggatgggtggacggatggatagatgaatgatggatggatggatggatggtgagtgggtggatggatggatggtggatgaatggatgagtggatggatgaatggatgggtggatgggtggatggatggacggatggtggatggatgaatgatggatgaatggatgagtggatggatggatggatggtggatgggtggaaggatgggtggatggatggatggatgaatgatggatggatggatgggtggatggatggatggatgatgggtgaatggatggatggatggatggatggtggatggatggatgaatggatggaaggatgggtgaatgggtgggtagatggatggatggatggatggacggatgggtggatgggtagatggatggacagatgaatgattgatggatagatggatggtgagtggatgaatggctggatggatggatgatggatagatggatggatggatggataaatggatggatgagtgaatgaacgaataaatgaatgctttttgtcttcccaaggaatgactcccacaacatgagagacttggggagccgggaggcagctgtttagaaaatgaatgacaacaaacccagagcccagacaagatctgaaacaccacagacctccttaaataataggggaaacggcatttcctaaaccagccagagacaccagccagctgtgatggtgaattttaggtgtcaacttgactggatgaaggaacacctggagaaccggggaagcattgtttctgggtgtggctgtgcgggtgtttccagaggagactggcctgtgagcaggtgaggagatgcccttcctgtgggcggcaccatccaagcagctgggagctcagacagaacaaaaagccagagaaaatgtgattccctctccctctcctggagctgggactcttggtctcctgcccccagacatcagaactccaggctctccagcctttggtctccaagacttgccccacaggttctcaggcctttggccttagactgaagatcacaccattgcttccctggttctgaggctttgggactggggccaagccctgtcacccccgttcctgggtctccacctcgcagaaagcctgctgggggccctccacctccacagtcgcgagagccgatgctcctaatcggcccctcttgtctgcctctacccggctgcttctgtctctctggtctctggagggccctgactaatgcgccggccagtcggtcaggctcctttcagccctgaatgctgtgaatgtaagtaggagccgatcagacaaggagtaagagagtcagctctgcccctggtagccctggagtccccagccccacaccccctcggttacccctgaccagccccacccaccccagacgacagtcagttctgactgcagagctttgtgttctggggagaaacagctgccacccccgtcctgggcaggccaagggtgggaggaacagggggagggcacgcagccatatcttcatggtctgaggttgctggaggccgccgagctcatttggaatggccagggcgtcccaactgggctgagctcatgaatgacaaaagatgaatctggacgtgtaggaaacgctcagtaaatgccccgaaaaaatgaaaggggcattcgctcttcatctctgtggccagagggaccgatgcatggaatggccaagtaaggaaccaggcctatcagccccgccctccacaccggctccttgtggtcaacaagctgggagtccgggaggccagagaccagcagcctcggcaagtcccctccctgctctgacccttcctcccctctgtccacggcagggactgcaacaaatacgccccggcccagcaagaggtccccaggagtctgagcacctgggcagaccaggccgcagggaggagctgggcttttgcttgtgttttgtttttccagaacacctgtcccggagaagccaggaggcgctggcagagcagaaccgtcaggctccagaccgtggtgaacgtcccagctccccagcctccgctggccccaggccagactccatttggaagtgctgaccacagcttgaccacggtaggaaaaacatccagggaaggaagcaagcaccgccacagagacagggctggcggggccgaggccaggcccacgctgaagggcaagtgcgggttccggctccattgctcccaagtgtgccagcacccagcacacggtcccagggggcccggtccccagccagctgtccctgacacaccacaggccacattcacgcgggctccaggaggcaaagggcatggctcagatgcggagaccagaagcagcaaggccccagagtggcggggccctggggcacgtgcggtgctgagaccctgcacacatggcttgacccgctcaagggaactttgagggtgggagtgtcaccgccattttacaaatgggacttggagaagctgagtcacttgggcgaggccgcaccctgggatggcagggctgggactcaaagccagcctgccggggtccaagtccatgtgctcagccacctgctctgtctcccaaaggtgcagccattgcgtcttttttttttttttttttaagacagagtctcactctatcactcaggctaaagtgcagtggcgtgatctctgctcactccaaccttcacctcctgggctcaagcaactctcctgcctcagcctcccaagtagctgggattacatacgcccaccagcacacccagctgctttttgtatttttattagagacagggtttcaccgtgttgcccagactggtttcgaactcctaacttcaaatgatccgcccacctcagccttccaaagtgctcaggttacaggcgtgagccaccatgcccgacccagccattgcatctttatgtataaaatagtggagagaaaaacagtaggcactgccatctgtgtgtggaagtctggacttgttttaagcgaccggtggggggcggcaggagcagcaacctgcacttcacaaacacctcctgtggacctcatccagtctcctcagctcagcccgggggtctgcacggtgacatcacctccattcccagcaccccacaccatgactcatggtccaaacccgccgtctactcccagctccccatgagagatgccacagcttggccagcaccaccactgaccgccacggtgagacatggggagaccagaggccagcatgacaagaagccccttctgcagcccctcagagccgcagccgcctcactggaaaccatggacgatgacaagggctgcccatttgcaaactgcttggccacacagctggtaagttgaataatgagagtttaatccaaatttatgtacgtcttacatcactgcattccgccatagcaaattaaaagcaaaatgaaattatatactgaatacgctgcattttaactgttggccaagaagtaggtttggccagggttttcctgtatttttctctttacagttatcataaataccagttgagtgtctaagtatgtgtgtacatgtgagactgtgtgtgtgtgaatgtgtgtgatatgtccgtgttggggggctgtccatggatgtctgtgtgaatgtgtatgggtgactgtatgtctgtgaatgtgtgtgtgttaagttgtgcatgtctgggtgtgggtgtgaacatggaagacgggttcaagtgtgtgtatgtgtgtttgtgtgtggtgtgtccatggatgtctgtgtcaatgtgtgtgtgtgagactgtatgtctgtgtgtgtgtgtatgtgagctgtgtgtgtctgagtgtgagtgtgaacatgtgtggggtgggtgcaagagtgtgtgcgtgtgagtgtgtgtgcgcgtgtgagagtgtgtgtgagagtgtgtgtgtgtgtgtgtgttctgaaggaccttcactaagtccagaaccatcagcctctccattacccagggtgctgcaggcaaattcatctctgctgcttgcagggaaggaacaggagagagttccaactcatttcaaaacaaatctgtaggaattgagaagccacttacaggaaagaaacaggcccaggccattcaagcctccctgactccagcccagcaggcaagcccctggacagcaggacccacaggcctcaacagggcatcaaactcccaggcaggtgcgctgctgcagggagggggctcagtgagtcatttaagggacacaaacttctaaggattcgatgattacacagagatgggctcatgaagaggtccccagatctcacgtctggagaattccaggagcgaggaagggaagcgccaagcctggtggctccgggatcgcccttgttccaggtcctgacctgaggccgtgcagcacttccacacgctcctctcagaaccgacttctcagcatgcgccactgcaaacccaaattccctctgcgcctcacaaatcatgtattcacagagcatttccttagataccaagtccctgataatgatgctcaaataaaccaggcagtaaatatcttgttacttcccatcagcaggtggaaatccattctcccggtggtccaggaagcagtgtctcctagaggcagcccaacagcaggcgggggcctggggcctcctcggccaccgtcagcacctccggcgtccagccccgaatccatcaggaagctattgagaccctgatcccatccatttaaaaagagtaaccgtggagctgctgggctctggaaggcaggtggcccctgcgtccctctgtacccaggctcaccaggaggccaccaatgaactacagcctcccagggcctttgcacctgccagcctcagggtcccctcatgtgcaccagcccggctcctgcatgcaggactggtgccatgtgaggcttcctgagaacacagagacacttcccggggtcaccactggagaataccccctctttgcccaataccttcccagagtcagagacagttctgcttgtcccggggtaaccgagataatccatttacagagcacacagtaggcgctttcccctcctcatctccccagccccttaggaggtggtactaacttcgacccattctcagaggaagaatcaagattcagggcaggaggtaaatgctcagcatcccctggctagaaccacagggccagggttgtctgcactctgctcttcccccacccgcctgaattcgtcacgcctggcctcaccatgactggagagagaaaggggccatcccgttgtcccagccccgacacacaaatctggctttcacaccttcctgtttgtaacaggacctgcctgcacctcccggacatgagggtgcagaaatccactggctctgtgttggagccaatcaggctgctccatggatctggcccacctgccgctgagccggcaaatcggccaccacagctgagcgaccgaggctggagagagtgactgctcacctttccaaagtctcgcacatcgaagaggtcaaaggggtcaaacagctcgctgttccttaatccaaatttatcgtggcagactttcaggaaggtgcgtatgttcttcaaacacagaaactaaagggaaaaaacaaagggagggcaaggaaaaacttattaaaactgtaagctctgtaaaaaccgtaacagcaacagcagcaagctctggcttccgtgcgccagcacatccaagctcattcctgttttctcaaggaggaaatgggctcagagagatgacgaaaccccccgtcccaaggctggggggtgagaagccaggcctggatggaagtggaagcaggcagaccagctccacatccgagggtgtagccaccaccgcccccagccttctcatcacatagctgcaaaacccccaaggcctgtgcattcagaagacacgccactccccgtaaccgtaggtcagggcggcaaggcagcaccctgggccctccatgaccatccaacccagctctcccaggcgcacccagcacatgtcgaggccgacagtcacagctggggcagaatatgcaagccttaaatcaacaagaatggatggcgcatgctcacgtgggcacgtgcacaggcgtgcgtacatacacgaggcttctgacaacaccaacacatccttcctaatcacgggtgacaaagccaacagccaggggccacccccaagaagccacggaggacccagagagtggcaggtgccaactacagtggaagggtggagggagcacaaaagccagaattcccaaatcaatgcatgggtcatctcctctctgcccactgccaaccagtgagctctcggccctcactgcgcctgacgtgccacaggggcggaaggcttggctggggcggaacggccatctgcccagtcctcgtggagaaacagcttggtaaggaaacttataaggcagcaggtgaggtggcccggggggcacgctctggaatcactcgggccccaggttggaatcctgtctgctgactccagcagggagaccagggtgagtggttatgccaggcctggttttctaccgccacctgcctcacgggattaatcatgtgccctgatgaccagagtgggcactggggtgtgggagccatcagccccccaatccagctcagcacggggattcgcgaggggagggtgtggcacacacagcccaataagagcccaggattgtcatcctcatcaataaccgtcccctatggacaaactgcccagctccaagagcagttcagagagcctgtccctgctcactggaaatttagacaaatggacagacttagacatagtgcacgtcagaatcagagcctaagagcgtaaaccaagcagcactgagaacgccctgggagcggagggtcccccagccaggacatacgcccctgctgacccctcaccctgcctcacagcaggcagtgctcaccccagccccttctgcctcaggccactcctcccatcctggcaggggtcggctgctgttcatagacaacagactcatctgttttatcctagagtccctctctgtccacgtgcgtgtgtgtgtgtgtgtgtgtgtgtgtgtgtgtgtgtttctgaacactcgagattaactacagtaatgacactcctttatccctaaatacctgagtgtgtaattcctaagaacaaggacatcctcttccataatcacagtacctacagcaaaaccaggaaattaacatggacaccacacggttatcttatctatagaccttacttgcatttccctaatatataaaggacaaccaaaatgtccttatagctaaaagaaaaaaaaaaaaaaactggcccaggttccaatatgggatcacacacagtttctgctgccatgcctcttcagtctccattaatctggtacagtcctccaacagaactttctggaatgacaggaacgttctatccatctaccgtccaatagggcagccactagacacctgtgcccaccaaacactcaaatgtggctagtccggctgggcgcagcagctcacgcctgtaatcccagcactttaggaggccgaggcgggtagatcactagaggtcaggagttcaagaccagcctggccaacatggtaaaaccctgtctctactaaaaatacaaaaattagccgggcgtggtggcgcacacctgtagtcccagctactcgggaggctgcggcaagagaatcatttgaactcaggaagcggaggttgcagtgagccgagatcgcaccactgcactccagcctgggtgacagagcgagactccgtctcaaaaaaaagaaaaaaaaaaggtggctactgaaaacctagattgctaattttaagttaaattttaaagctacatgtggctagtaactgctagcttagacaatgtgagtctaaaacactccatgatctttgtttttcacgacctgttaattctgaagaatacagacatgaaaggacaaatcctgtgtgagtccacttttttttggggggggggggggacggaatttcgcccttgtttcccaggctggagtgtaatggtgtgatctcggctcaccacaacctctgcctcccaggttcaagcgaattctcctgcctgagcctcccgagtagctgggattacaggcacgcaccaccatgcccagctaatttttgtatttttagtagagacggggtttctccacgttggtcaggctggtctccaactcttgacctcaggtgatctgcctgcctcagcctcccaaagtgctgggattacaggcgtgagccaccacgccaggccgtgattccactttcatgaggcccctggagtcgtcagatccacagagagaaaggagaatagtgggcgccctcgaagggctgagcgatggggtggtttcgtggggaacagagctcttgcttgggaagaccagagagttctgtggatggtggtgatggtgcttgccaacaaagtgaatgtgcttgaccctactggacggtgctctagaggaaaaccggagaagacactgagttttacgttatgtgtattttaccacaatacaaagattaattagaagagacacagagagacatggagacacagacccacgaggagtgcatgtgagatgggcccctttccttagcaactgggagtgacacagctgtgggccagccactccaagggtggccaccgttgccagaagcgggagagggcgtgggacgggctctcctccgtggccccacgaaggagctgttgctgccacacacaattgattcaggctgctggcctgcagccctgggaacaataaggttctgctgcttaaagccaccacggtcgatggtgcttggttaggacagccccagacactggagctgggagcaggcctgagccggggcaggggctacgccctctcgctcatctgcgcggctgcatgtgctgcagcttccagcctggcgtgactattttttgaatatggcttgtctgtaatttccactaagcatttattttcattcttcctcagcctcccaagtttagagttaattacacagatcccaaccataatcacagccggccaggcccaggcttcctttcgggcacaggatgggcccagcgcacccctttcccatgggcccagcaactgctgtgcctggcccggccccacccgtggccactctggccaccctaacctttaagaagtcctcctggtgcagctctgggcccaacccagggtggtctctgcaaaactgagccacacaggctgatgcagatggcagggacagggactgcacggacggggatggcagagaccgggacaaagcctgggggccacgtcaggctccacctcgagggaggccacacacggcccggcctcccttcagggagcatttcctgtgctttctacagttcatcccattttccacaaagggaaactgaggcacagagagttaaggacgtgggcacctgaccagagggcggcagcgccaagaatgaagccatgtcgacatcggccagggcaaaggccctctgagaggacgggcgtgtgggcaggcaccaggtccctcctgccatccctgtacccctttcctcagtggcctggtttgcaaggtctgtggtcgctctggagccaatcagagcctcaaggtccaggttctagacagagaccctgacggttggcagggaccggacccaaggctgaggttgctgcaggtgcatcatggccacaggggcccactgaggacacaggccgagggacagtggcaaagggaggcccagatggtggtcagcgccaggtgaaaagtcccctgtccacgcccaagctatgaaggctggcttcagctgtcacctgtggctgcaggagcaagcggcattcttctctctcattgatccaacctggccttcgggaccccccacaaaggcagccactgcttcccccagcatcctggactttaagtccagctgagtggccacagcaagggtctgtccccagaaaacaagccctgtgacaagggtcccagggctgagtgccctctcccccaggctggcggctatggggtccccactgtgtttgtttagggcactctgagggggcatgggctaccccacctcctgctccccacagccccagactgcagggagggctcccgcccctgggccccaagaatcccttgtccaggctctggcgctgcaatgagaggcagcgtgtagtgtgccctggaaacgtcagcccctttctctccggcccattcatcggcagccgcagatctaatcaggctgaaatcggattagtgtggtgacacaggctccatgcccagtcgcccacctccccaggttcagctgcactgtccttcagctcttgcaaggcgccagggcggggtgtcacagacaggagaggcggcgcagggccggagagccaagaccccagagccaggagcccaggtctgagccacaggtgaggcccgagggcatcctggatggcaagcttcaccggccaagctcacatgctcacaggacagtcacgtctctttagggtctctgaaacaatctattgtgatggggacacaatggcagggacaggcctctctgccctgcagaacccacggcagcccaccgagagcaggggcgcccttcagcctatgtgggcccttccactgccccttactggcaacgggtcaccggcagtgctggagtgggaaacaggacaggcctgcctcgccctccagagctggcatctagccggcatgacctgagaggggtacaaaaggggaaactaagccgggggaggcaaatccacttgcctgagtcacatagccagcaggcctcagctggggagctgcagtttgaacacaggtggcttggccatcgacccctgggcaatggtgatggagtaatagcagagcctgacaatgaccacaggcagggaggatgctgacgtgcacaacagccaactcactcaccacctgcagagcctgtgaggtgtgcactggcccactgcacagacagacaaccaagctccaagcagtgagctcatgggtaggcccaggattcaggggcaaatggagtggccgggatgcaaaagggcagcaggcccccgcctaaggggatgcaagaaagtcctgtctcgccaaggacggcagcacaaggcctgcgtcgtcaaggcaggtgccacactgtctcaggggctgactcctgggccccagctggaccatgcaggaggagcgtggggccgggctgacctttatgggaggtgaccctcgctgctccctcctcccaggagagctcgggcaagtctcctcatgtgcacagtgaggctctggcacagagctccaggcccttccggccaagactggctacgcgtctcggtgcgctgactcacagtgattataggcgctccacggccgccaggttttccagaaggccaggcactgggctaagagctcccttgagtcactgcagcaattcctaatttacagatgaggaaactgaggtttcaggaggtcagctggcctgcccaaggtcactagcaaggatgtaactgagctaacaatggatctgggatggtttgacccccaaggccagactgctggcctctaagctatcctgtctatgggtttctgggcagggaaatcccattattttttcttttttaaaatgacaacagtactttgacaaaaactcagtctgttcagaggagatggggaggcactgagtgtaggagcccggcctttgggcttgaggggcaggccccacccacagaaaccaaggcttaggaatggggccagagaggagggggctgacctgattgatcggcacataataactaactagcacgcatgcgccatttcacagcccactagcactttcacatccacatttgctccgtcagatgtggaaatggaggccccagaaggcaggtgacccgcgatctgaacccaggcccggttcctctcaggatgcccccagcctctggcaggcccatgcccgggaaagtccctttggctgccccaccaggaaggtcaggggcccgggtgtcctcagtcccaggagtggcactcagctgggggtggggtcctgcagggaaagccccaagctggggtctccagatcgcctggcccaaccttccccatccatgtagatcgtcaccaacaggcagggctcctcccaggtctctggctggcatccctgaaccaccgactcctgtcctgcacagtcctacctccccctggcctcttgcacacaaccacattccagtgcagaccccacagcaggtgctccaggtggggacaacccaggcctgctcccactcaacagccacacagcttctctgtacctcagtttctcaatctgtaaaatgggcaaggagaaccctgccctctgactcccacgatgctgggactctcactcaaagagactgtactgaggccatctcactggggaagtccagaagtcccctgagacattggtcactgggagagctggcaggggggttggggtgccacagttagctggagctgaggagcagccacagtgcacgagaacctgggcccttcatcaccatggtcccaccctggagctgttagcccgccaccccgctggcctttagttcgcagcagagctcctcaaggcagctgccagggactgggggagggacacaggccgacaagggacttctggggcctggcctcaggctctctgctcatggccagagcagcccagcaactgggaggtgaagacccccaccccatgtgctccttgctgcaaaagggaacctgggcaccacagccctgaaagcaacagggcaccacagcttctgggcctcaggagaacaggcactctcttttcaagcctctgggtctttctgagcaagctgggggtctccatgtgcagcctccacgccctgcggcaaaggctccaggaagtacccacagacatagatagacatagtgcgttttcttgaaatacttcaacaagtgtcactaacactgcgcttagcagagaccgattgcacgcctggctgctctgcttccagctggagtggtgctgactccctggggccacaatgctgcgtcgtgctgatcagaagctctgactggcagctgaggatgtctttgatcaataaaaaaatgggaaaacaaattaatttcctgttttatttatgccatgctcattccaaaaaccacttaaaatagcttgattactattcaacagatgcagcttgatggaatggatcaaatttggggcccatcaggtagataaacaggtgaccctgggtgacaggctggccaggtgctcacggagacaggagctgacgccgtttgctccctctgggtcccaaatgccctggacaatgcctagcccatcacacgggctcagtatctggtagacgaacaaatgaaccaatgaattaatgaatgaacaaatgaatgaatgtctaggaagcactcttaggtgtcctctgactgctgacacctctcaaagggccctgctttctcctcaagcagcagagagtccacgatgccttccaagacgtcaggggcccccaaggacagccactgctgcttaggtggcaacctcgcttccagaagcatctcttccgaaaacaagcaagcaggtgaaaggtagggtctggcctcgaccccttattcctgcacacatcaatgtcacctgcacaactctacacaccaccccaccagggacccattagctggtcagatccaataaccactctagcagggggcgggggtggtcccttatcacccattttacagatgaggagaccgagactcagggaggcccgtatctgctttaaaactggtctgtcgttgggcgcggtggctgacgcctataatcctggccctttgggaggccaaggcgggtggatcacctgaggtcaggagtttgagactatcctgaccaacatggtgaaacctcgtctctactaaaaatacaaaattagccaggcgtggtggcgcatgcctgtaatcccagctactcaggaggctgaggcagaagaatcgattgaactcgggaggtggaggttgcagtgagccgagatcatgccattgcactccagcctgggcaacaagagcaaaactccgtctcaaaaaaaaaaaaacaaactggtctaacttgacagtcatcatgaacactgagaggcttcccaggccatcaccagggcccccgcgctatggcctttgtgagtgtgtgtgtgagacagagtctcactgcatcaacgaggctggagtgcagtggcgtgatctcggctcactgcaaccttcacctcccaggttcaagcgattctcccgcctcagcctcccgagcagctgggactacaggcctgtgccaccaatgacgagctaatttttgtatttttagtagagacaggctttccccacgttggccaggctcgtctcaaactcctggcctcaagtgatccacctgcctcggcctcccaaagtgctgggattacaggtgtgagccactatgctcagaccgcactgagcccttaaagagaggctgcagtgcggggctcccaaggcagatgtccgaggccactccagctcattcactgctccaggcagggaaagcacagctcagccagggattgattgaggagtgtcacgagttgattttgtctggacaattgaacttccttcgctcgggcccatttcctcagctccgcacgcaccaggaccaaggcgtcaggccagcaggctgagtaatgaacctgacccgcctttgcgcatggcctcgcatgagtgtcccccttcgcccagctggggtgcggagctgctctacctgctgtgatctggaggagtggggtggtgttttcttcgtgcatatcaaggtcttcgggggccagccttgcccccaggtcaggggcaggcgactggcagagagaggggcaggccagatcagcagggcaggcggcccgcgtgccctcaggagtggagctccccccaccaagagcaagcagcttgagccatggctgctacatttgtccacaggaatgacagaaagggctgcaacaacagcgtgtctcgtttcactattctgtaaaggtttccagcattctcagtctcactaacactcgatgtgctaaaacaacgtccggtggctcttccactttctcccataacaaacagcgcccgctgagtccgtgcctggcgcagcacgaagcccttgacgttcctctctgcttcatcctgctaacgagctgtcacgtatccctggtctacaggtggagaaacggctcagggaccaccctgctcatcagggtagtgaggggaagacccaggtctaatccaggtggtctggtcctgtccccatgggagccccacggcataggcaagaggcagcctaatctgcggacaacctgggaggagggagggtcccggctggcttgcgtgaaggcagagctagctgcacacaggctctgtcggtgggtgcctctccatccctctgacaccagcactcctggggagaaacatgctcctcccttacgctgggccctcctgcttcccagggcacctcccaggatgactaccaaaacgcgactcacaacgcactacaccacctcggcactggtagaggaagccctccaagtcagacccacagaggcaagtccctgcccttagcaagcttccggacccctgtctctgcacacttcccctccttccccgaggacgccctgacccaattccggtgccttccaacactttccacaaggtctcctggccactcccacccccagctttccagctttggttcattcaaggtgggctgggggccctggatgctggagacacgtggctgacacgtggcacccgctagggctctgagcctttgactgtgctgttccagtggcctgaacactgttccctatccccacttcctgaccttgtctctttcaacccaagcccagctcatgaaaggaagaaatggcctttctcctcctctgtacctgccccctcgaatggcgggtcacctgctcaccacactccaggcaatgctgctgcgagatgggaaacaggcttcccagagaagatgccagaagactcagagggcccagccagctgtctccaaaacagggccccggaggcatggattcaaaatgtctgctaccagagctcagaccccaaactccaacctgcagcacgcaggcagccctgggtccagaatcccaggatcttccccaaaaagggatggggcaaggttgctttgtggctcaaggccaggaggtcccagagaggcagaacacctgcccccgacccgggcgtctcctgctgtttaggggtttcacgctcagcttttctcacagtctgctcctgtgcagcctgatttccaaacgagctctgctgcaaacttcaagcgcccagccggtgagaaccagcaaggaccagcagccgtgaagtccaggaaccccagtgctggggctcccacccgctgccagggtctgtctgtccacagcccctgagccatgaggagtgggttctcaaaggctgaaaagtcaagatctcaagaaaagagagacactctggctgcccagcaacccctggcacaggcaggcagggccaggccaagctgcagcattgcccctctccatcctgacggtcaagtccttcctcagcagcactcgagaggaaacccagcaagaaaaatcaattctggagaagcctcatttggaagtctgagtggagcaggtgggcagctgggaggctcctattcaactctgcacccgcctccagtccacagtcagacaccgaataagaggcacctactgcatgctaggccgccgcccagccgtgcgtgttcagagccagcagctgagagaggtctcagctttccacgcctgctcccctgaagccctccaaggacccacctctgctgccgacggtgggtttaagccaaggcggggggtataaagagtggcccacacaatcgggacttcaaggtcagggtcaaaccaaaggttttctataaagctagcagtaaattgcttttctagtatttctctttataaccatcttccctgagccggcttccgagtgccggagggttcaaatcctactctctggccacctggctctgagcaattagcccagacgcacgcctgcgcctcggccctccgggttgctctcataggacctcagcccctcctctctgctgcagcccacaagccatctgtgaaacgggctcttgtctctgccacctcattttctccatttcttcccccttccggaaagcggcctccgaggtcaacatgagggcattcgcacgctctctggagcgccctatctccagcgcaattggacaatccaactccagacggacccaagcagagggcgcgattcttcccgttcccccaccacccactaaaatgaaagccaaatggatcccttcacagccagcagacaccggatgatcgctctccagtctgaaggaacgattctcgctattatcccttcctgctgggctaaaaatattgaaggaaaaatgcaaccgcagcactagagagcttcccaagcaggggggtaaaactgagcctccttctatgatcagaaaccaaaggcaggcacagcccttggctatggaggcagcaaggtgggaggcggcctcttcccctgcagaaggccacaagccagccatgcgacagcaaagtgtcaaaaactcttcttagtcaattgccaaacgggcaactacgggggctggagaacaagagctggcacccagcagggtcagagcaggagtagaacagggactgtggggctttcagcctgaaaagtgtccctcatgcccgccatgtccccatttggagctcctgctggagcctctcctgcaggtgcctacaaagccccacccactggtgagtggccgtcacccgccaggcaaccccagctggacccaatgtggcacctcctcctcagcagtccctgtgcttcgtgaggcccatatgtgggagctgggagcgctagactagaacccctctcagcctggacccccgggacctgcccttcacctctcagagcctcagtttcctcacctgtcaagcaggggtggcagtcatacccacagcagctgacaccagaccacgggtgggtcactcaccttgtgctggggacagggcttttaggctgctcggctctgctgcaggaataggatcctcaaagcagaggcggtttccccattttacagatgggcagagtgaggcttcaggaagcgtagttatctgcttggagtcttaggcagctgctcaggatgctacagcaaaatcccacagcccgggaagcttgtaaacccaggggcttctttcttgtagctccagagcctggaagcccagtgccagcgtggtcaggttccagtggcttctccttgtaccattacacagcagagatgtacccttacatccacagagagtagagagaagcagtcccttttggtactcttaaaagggaccatcctattcatgaagggtccgctcttacgacctcatctaaacccaattacctcaaaaggccccagctcctaataacgtcacattttggggtagggtttcaacataggaattttggggagacacaaacattcagtccataacagcaagtgtaatgggttgaatgggtgggccccaaggagacaggtctgcatccagaccctgagaagcctatttgtgaccttacttggaaaaacagtgtttgcaggtaaaattaaattgatgctctcaaggccgggtgcggtggctcacgtctatagtcccagcactttgggaggccgaggcaagcagatcatgaggtcaggagttcgagaacagcctggccaacgtggtgaaaccccatctctactaaagatacaaaaaattagccaggcatggtggcacgcacctgtaatcccagctactcgggaggctgaggcaggagaattacttgaacccaggaggcggaggttgcagggagccgagatcgcaccattgcactccagcctgggcaaaagagcaagactctgtctcggggaaaaaaaaaacaaacctgaggctctcgagataagataatcccagattacccagtaggccctaaatccaagtgtccctagaagagaagacagaagacaagaggccgtgtgacgacagaggcacagattggcatgatgcagccacaagccaaggagtgcctggggccaccagaatcttgaaaaggcaggatggagcctctcctagagcctgcagaggttgcacagccccactgacacctagaacctggagggagcatggcccccgggacacctagaacctggagggagcatggccccactgacacctagaacctggagggagcatggcccccgggacacctagaacctggagggagcatggcccccgggacacctagaacctggagggagcatggcccccgggacacctagaacctggagggagcatggcccccgggacacctagaacctggagggagcacggccccactgacacctagaacctggagggagcacagcctgccaacatctagaacctccagaggcagcacagccctgccaacacctagagcttccagagggagcacagccctgctgacaccttggtttcaggctcgcggcctccagggctgctgctggaaggcgctggcctgtggttctttgttgggcaactccggtggccagctggtggcaggcagtcctgtgcccttggcgctgtgccccccaagcccaccacaacaggcacttggaatggctttgggatgaatgggcacacaatggaatgaatagggcttggatgagaaactgaggcaagagttctcctggtttcttccaccctttgttcccgttcatgccagcatgggttttgcaatgccctgcaccccggctcggagctgggagaccctggaccctgggcctggcacactggggccctctgaaaatgtggttttgacccccaggctcaattcagggctctttgggaagcaaagtccccagagggaccctggcagggtgggaagtcaggaagcacttgtgtggaacctcagacccagttccctctgaccaccatggggcccagcttcagacacccttgagtggggacagggggctcaggcacagggtggggcacctttccggcagggagatgcaggttcaaatcctgaaggtcccccacacccaccctgggaaacccagctcccatgaccccggctcccaggcctgcatgtccaacagctgcctccctgtctccaaagaaggcacctggcccgagtaccccaaaaccaagacctgtgggcctccatccctaggtgtcctccctctgcagaaaaacccactgcttgccagaggctacagccagcacctgacaggcagcgcctcccaccaccccttgcacaggcaggtggctccacatgtgggacaacccactgcacatgtgtgacattcttaagatcccagcactatacacgccatgggatgtaaaacacccttctcaacgtgcaacaaacacggccgaaaccgtcaccgaaagcactgcgcctgtctgctgctggggaatcactccgtggttagcacccatcatttcgagaagaaagagtcaattgtgatgttctgttaccatcccagtcatttccagggatttctgagaagcggcatgtgcctggtgtccctctgtccatctgcccatctgtccatccgcccaccagcacctgctgagggcctgcggccctgcatgcatggcccaggctgccaaatcagttctgtcaccatggggcggcaaggcacaaggaggagcaagtgcgcgtgagacgcccaacaggagagatgcctgcacttcaaggagctttctcgcctggtgctggaaaggacccaaagtactcagtgccgcagcagcacatcgcaagtgcgcagtgaatctgagtgaaatccacgcacgcctgaaggcttccggagaaggcatcgcaggtccagccatgggaggctggggggagcgggagctgtggcactgcagccaagcacttacatgtgccacacacctgtggggcgggcgggggatgctgctgatgctcgagcagggcaaggtctgtgatgtgtgtgtcctcatgtgtatgcgtgtggggtgcccatgcacatacatgtgggggtgcgcaggtgcttaggggtgtacaggcgtgcatgtgttcatgtgtgtgcacatgtatgtgtgcatgctcatgatgtatgtaccagtgtatgtatgtgcagtgtgtgtctgcattacgataaataaagctaagcaaaaatacatctgcaggagggcaaggaccgagataaatcattctgaactccaaacaggtggagggtaagatgtaaacagatttttcctgttgtttaaatgtacttcgttttcattatactgctgtttgcgtgcaatgaatgcaagtgcactgaggtgaggaaaaaggaaggcagacactccttcctccggctaccccacagacacccacaccatgagaaactagggcacccctgcagatgggaggcagcggtgaggtcgcctccaggctcggccaagggtacaggaagggcagaacctgaccaggccatttccagccagactctgcttcctgtggggagctcctgccccttcaggtcctaaaccttcaatcacccagattctggggaccccacagggagcaacatagtcatgccaccctccacaagcccagccagggagtgtggccccatacccgatgccaaggcgaggctcctggctgcggaagctgagtcggaagcacggtccccacactcctccttactccccgcccacgctcctccccactccccacactcctccccacccccctgcttctccccactctccccatactccccactccccctgccatgctgccccaactctccccatgctcctcagtccctccaatgccccccaagctcctccccattccccacatgctcctccccactccccacggtcctccccacctcctttctccccactccccccatgatcctccccacacccccactcctcccccctccccaccacgctcctccaactatccccactcaccccatgctgctccccattccccccaaagctcctccccactcccccacactccccccacgctgcttcccactccccccacgctgcttcccactccccccaacgccccccccacgttcctccccacccccccacttgcactccactcccactcctactcctccccactcctccccacagctctggcctcccccagcccgaggggagccctctaaaccctccagctcaggctgctccgtgaagctcagttcctgccgcttccgctcagcacaaaggcacggcccctgctggaggcccccgctccggggagctctcagacgggcagccagcacctcactgcccatctgctccttccctgcttactcgcagagtcaagacctggagcccacggggccaggaggcacaaagcacagcttcccaggtgacgctggacaagtcgctgaccctcctggagcctcagtttccccaacccagtggctctgaatgaattccctggattcctgagaaggagggagcttcctcactggttcacagggagagagggagggaagggggttctgacaattaaaaacaggtctgcaagtcaggaactcgatgatctccagaggtgccatgatcccctcgtctacccagcctcccctgggccctgcagcccctccctaccctgtgaccctcagcccaagcccctggggagggtctctggttctcagctgtggggttgggcccagcgggtctgggggcctggtggggaaagggtgtctagggtactctgtctttctacctttctgagttgtttcttcttttgctttgttttgtttcgttttgttttttttccaacgagtagacattacttttagaatttcttaaaaagttatctcagctttgggttgggttagggaggagggagtcctgggaatgtataaaaagcacgcagccagttagttcctgagaagtcagaaaatgcgaagatcaactgagaagctgtactttctggaaattccaggcgaaccagcaccaggcccctcggctggtgggcagagcaccagggggcgagggagcgggagggggattccctgctgccaggccaacagctgggccagccaaggtcaggaatgctgcagctgcagcctcgccttccgcccccacccaggcgggagcccagtgggagggaggctgcccctgccagggcctgggacagagccctctgtgggggacaggccaggcaggaaacccggccgtcctcaagcaggaaagctgggccagagctggtacttcagcagggagctgaactccagtcctgggcgcacctgtttgcagtcacaaaaagggcagactgcagcacccacccacctgcccagctccccacccagctccccacctgcccggggtacccaggactctctccaacgccaccagtgtctctctggttcctcactctgtgcaagcctaccctctggtgctctcccggttaggatgatcgtccctgctttaccaggtggggaaactgaggctcggcctggcagttacgggcctcccctgtaccagctgctgcaggtccggtctcatttcaccagggaaggatgtgtgcccaggacgctgctccctgggatgaaacgggtttgtttttttctcccagtatagaaataaccctgcctggatgagggcagggaagtagaataacatgaaaccgacaagaactcccatcctaaaacaccactaaccactgagggcgtttttctgtcgtctcttgactctgggtttttaggggttttttatgtgtgtgtggtgttttctacatatttgactactgggaataatatggcatattgcgtcctggtgccccttcgctgacagcacaggtgtcccagctccctgcctccccggctgcagggcagggcgaggaggggaggccagggacatgcgggcctggtaccttccagggcaagagggacgtcatccccgtgggcagagcaggaaatggaggaatgttgagttccctgcacccgctgtcaccgtcacagctggccccacctcagccgggacaccctgcctgggccactccaagtgactgtcacaacccgagagcctatggccaagatgagctccaccaagtaaaaatggtggagtgtggggaaaagcaagagagatcagagtgtcactgtatctgtgtagaaagaagtagacatggaagactccattttgttatgtactaagaaaaattcttctgccttgagattctgtgaccttacccccaaccccgtgctctctgaaacatgtgctgtgtcaaactcagggttaaatggattaagggcggtgcaggatgtgctttgttaaacagatgcttgaaggcagcatgctcgttaagagtcatcaccactccctaatctcaagtacccagggacacaaacactgcggaaggccgcagggacctctgcctaggaaagccaggtattgtccaaggtttctccccatgtgatagtctgaaatatggcctcgtgggaagggaaagacctgaccgtcccccagcccgacacccgtaaagggtctgtgctgaggaggattagtaaaagaggaaggcatgcctcttgcagttgagacaagaggaaggcatctgtctcctgcctgtccctgggcaatggaatgtctcggtataaaaccggattgtacgttccatctactgagatagggaaaaaccgccttagggctggaggtgggacctgcgggcagcaatactgctttgtaaagcattgagatgtttatgtgtatgcatatctaaaagcacagcacttaatcctttaccttgtctatgatgcaaagatctttgttcacgtgtttgtctgctgaccctctccccactattgtcttgtgaccctgacacatccccctctcggagaaacacccacgaatgaccaataaatactaaagggaactcagaggctggcgggatcctccatatgctgaacgctggttccccgggcccccttatttctttctctatactttgtatctgtgtctttttcttttccaagtctctcgttccaccttacgagaaacacccacaggtgtggaggggcaacccaccccttcagtggagccaacaaggatgctgcagagcacagctccatcaccacctgcattcatccattcatccttcattcattcattcctcaatcttgtgtctggtcctactttgtgccaggctccaggcaccaggaagaaagccctgggccctgcccacaggaagagacagtcacaacccgaggttcccaggccaggcctgcgaggtgctccctgccccgccccaggtgttatttttggaggaggcggtgggggcctcccagggaagtgagaggtgccgagaaacagcacaggccactgcaccggccacagccccaggggcccaggcccaggcagggcttgcagcagagacagccccagatgatggggttcctgactgagctctcctccatgctgacagctactgaaaatggcaaatccataggcactagagatggtcccactgccaccaacagtcctcaaccccaggctgcaggagagatgctcagaacctgctgggccaagcccctggctgtcacctggggcagctgctgcacggaagccacaagagaggcacagctgggaggcacagacccaggccctgcaccccgacccacctcactcaggcctccgctccgggcttccccaacggtgacctccccaagctcctgcccaccctctgcgccagactgctccttcccagggtgaccacctctcaagctgttcctctcaccacccctttcacaccccattctgctgcaggcctgagctttcagggcaggctctgacccctgcccctccctaccagggagcccagggcacagaggcaccaagcaccccgtgaccgtctggacggaagaaagagtaagcagtgcagaggctggactgtgcaccacgtcccctatcttgtcctgactcccagaacctccaaacgtgacctgatttaggaaaacggtctttgcagatgtaactgaggtaaggacctcaagaagaggccatcccaggttagggtgggccccgaatccaatgaccagcatcctcttaagagacagaagaggagagaggcacagggatgaggccctgagaagatgaaggcagaggctggccagccaaggagggcccagagccgcaggaggtgggggaggcagggggaccctcccctagtgcctctggagggaggggctgcagccctgatgtccctgagaattcggacctctggcctccggaactggaggagaatgcacgtttgttgtccaaagctcctgagtttgtggtcatttgctgtggcagccacaaagcacacagtgagagccgggaacacgggtgcccccaaaccttacaaccgccaggccctcgtctctgaggcatcctctttgccatcgcccctgccccggggctaccgctcattgttccactctctatcaggagaaagaactgtgaaaaagcagcaaatgaaccaagctggggccgacagtccagcggatcccagcaagacaacgcgttcccaaaggcatcgctgcaggtgcactgtgaggtcagggcgccctccgggaccaagctgggccagaaagttcttatctgtgggggttttcatcatctctcagtttaaattctcaatcttcctgcctgcactggccacctgctccttggtctctggcaaggtctccacactggacagaggcccaggggagctgggggaccccactggagcctcactccctgcaggctgaccctgagtgccggccacgggagcctctgactcccacatgcatgggaggagtcatgaaagtggctcctcaaagcctctcccccaaatcatgtctccgcttaatagcggccgccaattatttcccaagccaggggatcaaggacttatctgcggagaaaacgggaagtaaagtgcattcttttcctgttcactaggagtcagtgaacgccctgctgactggcacagaaaagggaggtgcccagtatccaggccaggctctttcctcccccagccccggcatgtggcgctttgtctgcctgactctgtaataccctttgtggaacgcaggagtcccgaacccagagaggagctgcagcctccctgagggaagaagaactctcataagtaaagctcagggaccacctactccacactggctggtgccaggctccccggggacagagccaacggggcaggaggccgtcatgggaagggtgctcgagccggccttggagaagcccaggaggatggtgagcacagaggcaggagggcgtgcttggagaggaatggtgaccacaggtctgccgccttgcaatgcgacgcctgcctgggagcgcaggtgagggagcaggggcctccactggcccacacccggcacacatcacgggcggccccaagctctccaggtgggagctgctgagcgcttttagttagcccaacacggaccaaggccacctcggcttcattcaccaagcggtccccaagaaacaatcactgcagtccaacagaatagtcaaccttttgatctcagaggagtgtccattaagagtagggttcctcactctcagagcagacctcccagggacccccggccaggactcaagccggccaatgagggctgaagcttcggcctgtggccaagacaccatgggcagtggaatgagcaacgtgcagttttgcacccagaaactggtcaggcttctgatgggaacggaggttgggaacaccagcatctggggctgcagaccagagggccctggaatccccttctccaacccagtcgggtttcagtgacccaaggtcagaggcatggagggagccctttcccaccccccgctcaacaggaacacagctgcttcacctctctggggtctataatgccctctgacctcacaaagacccacggggctggtttgggaggcccagcccaggtgctccagtccccagagcacgcataagcctcagccagttttacttcccattgcaaacccctagccggtttgcctgcgaactcccaagccagctgcagaaaagacacaggacacaaccacggcccagtggctcagggagaagacccgggcttgcatgatgtacaccagggagcccacaggagcagagtggcccctcgttctggtggccacgcaggcctaggctgggaacagggagaccctcaccgtgagcctcatccacccagagggtgcccccaccctgactcctcaccccacggtggcccctgccagaacccagcatcatcccccatgccgggtgctggggaccctcttcctgaatggtcctcagccaccaccatccccaccttgatggcctcatggaagccagaggcttagcactgacatagcaaagccagctggctcagcactgggggtggagggaatgagcagacagaaccccacaggagttccaaccccaccctgcccaccagctcctctatgggaccctcctgggcacagagggggatgaaggggtaacaggtaaggatctcaagatgaggccacccaggatcagggtggaccccagattcaatgaccagtgtcttctgaaggcaggagggagatgcagggaagccccatcttctaggagggcctggacttgagctccacactcaagttggccagcagagtccagccatgcccacaagcagctctcaaagtggcagtcccctgtcagctggggtaaccaaggtaggctttctatccagaggcagaggggtgcgggtgtccctgcagagaggagctggtgggaggagctgggtcctccctactcccctgggtcttgaggggctgctcatcccccagcccagggcacctgggctgctgcgggggtcctgcagatcagggtaccctgggacgcccacccaggcctggctccagctctccaagcacagttagcagaagcccctccccgccccaccccccacaaagctcccggtgctgggactcggggggctgtgaacaccaacattttagtgataatttcatcaacattaaggaaattgaaagcaccatttgatttgagctctaccgagtgcattaattccttgaatggttttcgagatatcattgtttgattttgcaggtttcaactttcccttttatgttattaagagtatcttttctgcttcaaaaccacattgagcgcttggctccattcctaggttttccccagacctctgaccttcctccctcctgaggttctttcatggctgctaaaagtcttctttttccagagcaaattttgcaaatctcaatttcgccaagaggtttgacttttcatccactttagtcaataatgtgattgggtacagctttattaacagtcacttttattttggactgattatttctaccaataagcatcttagaacttaattaaaggtggtcattatgtcttggagcaaaggccctttgcacggaaactgggatggtgcccggcagaactcggggtcgaagctacaagagcttccccaggacccagcaccaggaggctctgtgaagacagtattcctctagtaagtatcaattaatgatcagtcaatcagggatcggagccctcagcagagtcagcagcccaggattactagcacggtcaggaagacccaggaaacgccactgaccagaaccaagggagagagggcacggaggccatcaagcagggagggctgggggcacccagggtgggcagagacggtgcagcctgtcctcataagctggctcgctaagggtgtgtgtcaacagagagcctgcacgtgagctccacactccaagtcggccagcagggtccagtcgtgccgacaggcagctctcagggtggctatccctgtgttgggggtaaccaaggtaggctttctacacagcagggctgtgggcatccaatcaaaagggcttggtctggtcaactccagaacttccaagcaccagaaagccattgaaacaagaatataaaacgccacgttgtatcacatccaaggactgtcacacgtgaaacatggcatgattttatgtatcgccaggggaaaaaatgcctgtgaaactctaattatgcctctgattacaaggcttccatgacccactctggcttcagagatgtcagaacatgcaaggaaaactatgtcatcttggaatcaatgaaataaagtacatggaaaaccatttaggataggcaaggatatgagaaaagctgagtcctaaatggaaagtatagcacagcccagttctgtaaatcaaacaggagtgaccacaattaaatgtaaatagctctcctctaggtgataagaagactagtaaactttaaaaaaaattattcattcatatatatatatatatatatatatatacatatatatacatatatataaatgaataggccaggtatgttggctcatgcctgtagtcccagcactttgggagtccaaggtgcagattatgtgagcccaggagttcaagaccagtctgagcaacatggcaaaaccctgtctctacaaaacatacaaaaattggccaggcgcagtggcacacgcctgtagtcccagctactaaggaggctgaggcaggaaaatggcttgagcctgggagttcaaggctgcagtgagccctgatatatatatatatacacatatgtatatacacacacacacaaatacatgtatttacatttgtacaaatatatacacacaaatatatgtatttacatttgcataaatatatataatacacatatttatgtatataacatatataattttgcatgcgtatgctttttataatggatgtcatatatgtataatgaaaaatacattttagcacaacataaaaattataggccaataccctaacgaacatagatgcaaaaatcatccacaaaatcctagcaaaccaaatccaacaacacaatataaagaccccttaccatgatcaaatgggatttatcccaggaatgcaaggatggctcaacatacagaaatcaataaacatgatatatcacatcaacagaaggaagaacaaaaaccatatgatcatctcaacagatgcagaaaaagcatttgataaaattcaatatcattttgggataaaaaccctcaaaaatctaggtacagaaggagcactcctctacacaataaaggtcatacatgagaaacccatagctaacattatactgaatggggagaacctgaaagctttttctctaagaactggaacaaaataagggtgcccactttcaccactcttattcaacgtagtactagaagtgctagccagaccaattaaacacaggaaagaaatagagggcctccaaattggaaagcaggaagtcaaactgtccctgtttgcagacatgatcttagatatagaaaaccctaaaagctccaccaaaaaaacctagaactgataacaaattcagtaacattgcaggatacaaaattaacatatagaaaacagtagcatttccatacaccaacaatggactagcagaataaaaaaaaaatcaagaaaggccaggcacagtggctcatgcctctaatcaccgcacattgggaggccaaggtgggcagatcacctgaggtcagaagtttgagaccagcctggccaacatggtgaaaccccatctctaaaaaaaaaaaataataataacaaaagttaggcaggcatgatgatgggaacctatagtcccagctactagggaggctgagacaggagaatcatttgaacccacgagatgaaggttgcaatgagccaagatcatgccactgcactccagcctggatgacagagcgagactgtcaaaaaaaaaaaaaaaagtcaagaaagcaataccatttataacagctacaaaataattaaaatttctaggaataaatttaaccaaggaggtgaaagatccctacaagagaaactgtaaaacactgattaaaaaaattcaagcagtcaccaaaaatggaagacatcccatgttcatgcattcgaagaattaataatttgaaaatgaccacactaccaaaatatctatagattaaatgcaattcctatcaaaataccaatgacattcttcaaagaaatagaaaaaacaatcccaaaatacatattgaaaacacagaagaccctgaagtgccaaagcaatcctgaacaaaaacaacaaagctggaggcatcacactacctgacttcaaaacacactacaaagctacagcaacaaaagcagcatgatactggcataaaaacaaaacacatacctagaccaatggaataaaacaacccagaaatgaatccacacatttacagtcaactcattttcaacaaaggcaccaagaacattcagtggggaaagaacaatctctaataaatggtgataggtaaactgcatatccatatgcagaaaaatgaaactagacttccatgtctccccatatgcaagaatcaaatcaaatgggattaaagacttacccataagacccaaaaccataaaactactgaaagaaaacattggggaaatgcttccggacattggtctgggcaaagattttttgggtaaaacctcaaaagcggacagaacaaaacgaaaaatagacaaatgggattacatcaagctaaacgcctccacacagcaaagcaaacaatcaacagagtgaagagaaaacctacaggataggggaacaaatctgcaaactattcatccgacaagggatttttaataaccagaatacataaagaactcggtccagcgaggtggctcatgcctataatcccaacactttgagaggccgaggcgggaagatggcttgaggccaggagttcgagactggcctgtgcaatatggcgagaccccgtctctacaaaacatacaaaaattagccaggcgtggtggcacgcacctattgtcccagctacttgggggctgaggtgaatcacttgagcctaggaggtagaggctgcagtgagctgtgatcacaccactgcactccagccaggtgacagagcaagatcctgactcaaaaaacataaaaaatttaaaactttaaaaaaaaaaagtcaacttaatagcagggccgagcacgatggctcatgcctgtaatcccagcactctgggaggccgtggcgggcagatcacttgaggtcaagagtttgagaccagcctggccaacaccgtaaaccctgtctctactaaaaatacaaaaaatcagttgggcttggtggcgggcgcctgcaatcccagctacttgggaggctgaggcaggagaattgcttgaacccaggaggcagaggtggcagtaagccaagattgcaccactgcactccagcctaggtgactgagcaagactttgtctcaaaaaaaaaaaaaaaaagcaaatagtaatgataataataataatctgatttttaaacgggtaaataatctgttattaagacatttctcaaaagacatacaaatggccaacgggcatgtgaaaaaatgctcaacatcactaatcatcacaggaatgcaagccaaaaccacaacgagataccatctcaccccagttataatagctattatcaacaagaaatcaacagatgctggcaaggatgtggagaaaggggaacactagtacactgctggtcagaacgtagactaatacagccactataggaaacagtacagagggtcctcaaaaaactaaaaagagatctgcctgatccagcaatcctaccaccaggcatgtaaacaaaagaaaggaaatcagtgtttgagatatatctgcactcccacctttaccgtagcactattcacaatcaacctaaatatcagtgaatgaatggataaagaaaatgtgacatatatacacaatagaatactattcagccatgaaaaagaataaaatcctgtcattgcagcaatgtggatggaactagaggtcattgttaagtgaaaaaagccagacacagaaagctaaatatcatatgggccgggtgcagtggctcacacctataatcccagcactttaggaggcctaggctggtggatcacttgaggccaggagtttgagaccagcccgcccaacgtggtgaaaccccatctcctactaaaaatacaaaaattagccggatgtggtggtgtgcacctgtagtaccagctactcaggaggctgaggcaggagaatggcttgaacccacgaggtggaggtcgcagtgagccaagatcacaccactgcactccagcctgggcaacagaggaagactctataaccaaaaaaaaaaaaaaaaaaaaaaaacctaaatatcatatgatgtctctctcatatgttaaagctaaaaaagttgacctcatggagggacagagtggaatgatggacatcagagactgggtggggcgacaggaaagtgaagagagattggttaatgggggcaaacatgcaattagacaggaacgagtcctagtgctcagaagcacggcaggaggattacagttaacgataacttcttgcatatttcaaaataactagaagagaggacgtgaaatgttcccaacacaaagaaatgccacatgtttgggatcatgggcatcctaatgaccctcatttcatcattacacacggtatatgtgtattaaagtgtcacacataccccataaacaatggcatatgtgtatcaaagtgtcacacataccccataaacaacgtacaattattatgtaccaattaaataaataaataatacatttgaaaaggttgtgggggggaaaaacaccaccaaaaggcaagagaggctcagagatgcagttgtcaaagctctggtaccacccatgcaccaggcaacatgaagaggaagagaaacgcgctcggggccagtcccatggtccccagggtccctacccatggggccatccccgggggcctggacagagctgccggtcctctagagcctacacgacccgggctctggggctgcctggggacatcctccagccacacactgacccatcacagagccttgtagccgggagagagagccaccatcggcctctgcctctcgtgcagcttcagaccatggcactgtcctctgtcagccctgggctcactcctgggacctgccggggtagggccctgtccccagctcagatctggagggtgtctcgagacccccggctggctggctcagcggctcgcgacagcacagccaccctcggttgcagcaaatgtgcctcactgagaaccaccacgaggctatttcccgattaaagctttaacagatcaatagcaataagtgagtcccccaaaaatcaatctaaggcagtgcccttttctaagaaaaaccactctttccacaggcaaaaaccacttaaaaataagagacaactgttttgggttttgaggcagtttggccgggtgtcggtgaaagccgtctagttgcctgagatgaatcccacatgccgggattcacacttcccccgagagctggattccaccgtgcccgccgggcctgcgaggacgagagctggattccaccgtgcccgccgggcctgcgaggacgagcctctgcacctgcttccctcctgccggatgaactgcggcttctcacggctgcgctgctggcatggtagagaatacaacgaacagggaaggagggaggatctggaattcagtctgtgccaatcagacgtctctctccagggatctgacagtgccagaggctgctaagtttggtcactcccaggctggggccagacccaccaagaccactgacctcccaccttcaagtccagcaaacctggacaccaaccagcatcagcaccactgagacaagaagcctgaggccaaccagggaacctcaggggtggagctgaaacaccccaaccctgaccagagcggattccaggaaggctgctgggagaacccagacatccctgcaaccttggccagtgggggacttgaacccctagggccaactccagatgagccccactgtccatcgcactgctcaagcctgaccccagagcaccctcttcatcacccaagtccaatccaccccaagcccacccactcctcctgcgctccagcggggccgtccatctctctccattcccacttctctccccaccccccagcctggacacccccatctgcctctgccccagcctctggggctccaggcctccctctccaggtgtccctgtagtgcagacacagtggagctttccaaagccaaatctgagcacgccacatctgcaccaaccctgcccagggttccctggcacacccaggatgaagccggccctgcctccctgcagccttcaaggcagtgactcagagttcctgccaccccccagacgtgcagggtggtctgcaccccctggcctcagcacccgctgctcctgccatcctggtcctccaccctccctgcccactcaacagctcccacaatggccacactcctcccgctcccctcagactctgcaggactccttgaaggagagaccgagtctcaaccatctctcccttgccccaagggccaatcactcacaagtgccaggtcctcagctccctgggcacaggaaggcctggggaagggccccacccgatgaccccacacagcaagcgatgtgaggaaaacccccgcccgccatgtcttgaaaatacaagtctcgtaaaaaggcagtttcccaagcggaggctgggggatggcaccacgttcggtgcttgctgggagccagggaccttggcccacacgaggccaccgaggctcacgggacctcaccagacctcacctgaccacccccacagcccgttctacagaggagcccacagaggcgtggcagtggcgatcacgaggctgtccacggcacccacagccctgtggttggtgtacctggtccctttgacagacacatgtggggctgcagagatggaggtggctccttccctgggcccagccttgctggcccagcacctccaacttcgaagcccagccccagcctctggcctagctaccaacaagaaagctgcctctcctcaggccccaggggcaggcagcagaaagcctcgggcctgtcacctgccccacagcctctcgtgtcaaatggtctcgtctgtccatctgcagggcagccctgaactagcaggccactcctcaatcacagtaaatgcaaacggcttctgtactcttgctttaatctacagcctggctctccctggttaacagatgtttcgtttaagcagctaaattaccacaaaatacacccaaagagatgacaggccaatttctcccaaggttcatttgcatgagaagggaatggtgtgtgaaaattctatcttttcctttttgaaataaaaaatatatatatattacaggtgcaagtcacagtatctcaggagcccgcggtgcctcctgcggggagtggggacaccaaggtctggaccgggaagccccgggttccactcccaccatcgcttcccccaacgaagtcaggcagagtccgtgtgccctctgaccctcagtctccaaagcttgcagatggaacagtcgtaactgctgctgtgaggcctgtcgggggcagggaaagccctctgggggtcagacccacttggcccctcggtgtttaactgatcctgatcgtcaccatctgggtcgccacggcagcccaggggcagccgcaagcaggcaccgtgggaccggtgactccactgtgccccaggaacccaggagggggccacatgttctacgccaatgactctctagcctagaaactgtcctggccaggcccacggcccacacacacacagaggggcagcccaggagccagcccacccctcccaggccaccagacggcaacaccagagaaaggctggggggcctgagctgctccactggggaggtgagtcgtgactgtgacactggcctcctgcccaggccacccatttcatactgcaaaggacaaccatggccagcatgtggaggctgctgacatgaagggtcaaggccagcgtgggaaggagcagggcaggacaggggccccaggagctggtccagggtgtgggctgagccagtcacgggtccccagctgtcaacaaaacccacagcctggggccacctgcaccacccgggtcctgaatcacaatggggaggcggccagggcttcccccaacagaaagggcaactcctggtccaacagcatccccgtagagtgcacagacctctgcaggcaaaaaaggcccctggggctgcagatccccgagcccttggtcacttcaaagggcagaaaacaacctcaaggaagtggacggcatggcccggattcaccagagatgcagataggcacagaagggaagtcttctgccccaggtcacacagcgcggatgcagaccaagccccaattcctgtccccaaaggccattctgattcatccatagccacacacacccacacacaccccaaagtcccaagaattcatgctgccaagaattcgggccgcacagatcagccaacccataaaacacacacatgactgcttcgaaaggtgaggtttatggcctggatttattgacgtggtttttcactcccagataaggcacctgtcctcagcgggcacgcccctcagctcccgctaactaaacagtcaggaattgctgggcacccgtccgtccgacccttctctaagaacatctccaggcttgcagcccaggcgctgcgatgctggggcagggcaggggtgggggaggctccaggaacacactgcgtcattagctaatgcagaaaaatggagattcacccaaagaaagcagcggagagcccatgtcattattaaaggcaaacactctttgccgctggctcccgcagacacatgtagccgaggggcggcccgcctcctgcaagcctgagcccccctgagaaacatctccttaagaaacagaagagggaacttgtcacccagagcatggagcacagacagtcagagtcatcggcagggcctcccgcaagagtcctcacaaagcagatccgaaggcagcggaggctcttgccactcactccagcgaggggaacctgactgcagacacccgcccaagccctcctcccacccactcctggaggcgtcaggcagaaatgatggccccactttacagatgaggcaaccaaggcccaggcatgatgcaggtggcccgagatctcacgtgcccactggacccatcttccttcatcacttaacctgagttaggcactggctactcccatgatgaggggtgtctcacaagtccatggagaagctccccatcaccactttgaagatgctaagggaagggtgggaggcggaggaggagggcactggggaagccgttgcctggaacaccaaccagcctccctcctggagagagatgggaacggtaaggaatccccagggagccctgccttggtaccaaggcagcgggcagtgaagacccagtgccacggagggcccaaggaaggtccatgggcacaggggatctgcaagcccccctgtctgcacacagttgaagagacctcaatgccaccatctgtctggcatctggcccgcctggcccagcgctcagcccgcccagagcgtcaaccccctgcatcctcacacccactctgcacaggaaaaactggcgctgtaccgcgaaactcggagttcagaaacgtgccaaagtcccacaaccaggaaagaacaggcttcttctggtgtatggtaacatcagcctccctcccatgacccccgggcaggactggagagttatcctgtcaccccggcatccctatgccgctggcctctggtcctgaccctggaggtgggctctccccggaaggccatctgcaaagggcagcggtgcagaaaaccactcccagagaggaaggagacccaaagaagctggcgcagacgagctgacagtgcccaacccacgcacgccctacagagaaggaagatgacttcaaaataacacgacactctccctcccaattccagtgatcaaggtggcaggtgaggaaccctagataccccgcacaagggtgacgccctcgccctttgtccctgggacattgccagtgtgtggctacccacgcctacccacccatcaacacccccatcatgagaaaggacacctgcgtgtccctaaagaggaagacaaaatgcagggcccccccaggccttgggataagcatcaaattcccactcagctgactgctgggaaagaacctcggggcagaaaaacaacatggcaattcaggaggaaaatgaggacgtggaagcaggatccagcaggtcagagtcctgaccccagattaccaggccaggaaggtgggggctggggtgttgtgaacctgttccagaacgctcccttcacgctcacctggcgcactgtcacgcagggctcagctaaaaggtcacttcctccaggaagccccagaccctgccccacccacccgctgccacattcctggcagggcccagcgtctcctcacactccctccacactgcctgtgtggtatctgcctgtgtcctcctgggccgcaagcagggctgcctgtctgcccggagccaggcacggggtagcggtcagtaacgcttgctgggtgagtgaatacccaggcccaccacaactccagctcccttgcacaagggcctagacagggaggtggtcccagaacggcccacagtgcccctccaacctccagcctccccttgaggcagccactcgccgggtgggagtggacgtcaggtgaggtgaccagggcacaaagcagcacagtcacatcagcagtggtctccgtttgctacctgcttttgcgctgggccaaacacacacctgcaccctgtgtcaggtgtgaccactccacatccacccgggggacggggagtgcaccaccttcctactgtggaaatgggtaaactgaggctcagaaaggtggagcaagttgcccaaaggcatgagcaagctacagtttccaagctggacttggaaacagctcccttaacgtggtcctcttcctcactgtgccattcacccactcagaaaatccacacactccctgcgccctgcacccagcagtgcgccgcggacagataggtcacgccctgcacccagcactgcaccatggacagacaggtcagcacacaaggcttctgcttccaggacttccagacaggacactcacttttctgactggcccccgaagtcttccaagaacctccaatctctcaggccaacagtttccctcaaggtctgtaccttgtggtaccgtggggagcgggcctcacccaccctcctgcagggccttccacgtgattcatgcccctggcagaacccagcgtgcgtcatggcccagagcgagtgtggtccatctcaaggccctttttacggccttttcctgctgacgccaaccaaggcaggtgaaagcaccaacaggccgtttcacagaatgaagggaatgaaggcctcatttcatcaactcctaccccgaggcagaacccatccccttactaggaaaggcaggcaccccagcctgccccggcacccccgccatgtccatggcctcccccaccaggagctaggagggctggacacaaacccatatcctcgctcagtgctcagtgggccaagcctgtcacccacagcaggaacttgctgggtcaatgttatctgcctctctccctccctacctggcctcccacacttggcttacctcccatcttggggtctgtttctggggggcccagcctcagagccttacaaaacaggattaaataaaacttgccagccctgggcagagactgtcactcacacaaacccctcaattttcaaaacacgacatgtattgcggaaagtattagcagcagcaacagccccagtttacagataaggaaactgaggctcagaagtgatgtggccaaaatcacacaactgagaaatgacaaaggacacaaagtctagctccctccaaagtctctgagcccccagcctgcctggcatggccaagggaagcccacacggggctgctcacccaagaacacagaggcacagtgccctgggtccaagagagtgttgagctctaagagaatatttaaatatctcatacctgtatgttcacctttatacctatgcagtcacagaatagaactttcaatatttgtcaggagagagggacccaggaaggcagacgggtctcctccaaccctcccacacttcttctcttgtcaggggacttttaaaaatgctatgttggccaggcgccatggctcacacctgtaatcccagcactttgggaggctgaggcgggtggatcacgaggtcagtagttcaagaccagcctggacaagatggtaaaaccccatctctactaaaaaaaaaaagaaaatacaaaaattagccaggcgtggtggtgggcacctgtaatcccagctactcgggaggcagaggcagagaattgcttgaacccaggaggcggaggttgcagtgagcggagatcgcaccactgcactccagactgggtgacagagcgagattccatttcaaaaaaaaaaaatgctatgttggccgcctctagggtcatcctcccacaaggggatcctttctgcagcagctaggttaggatggggtccctcaacccctgatggaggaggcgacagtgagatcctgagtggactctgggaccagcatcctctggccagcagtccaggggggcagtccccccagccccgcccagccctgcctctcctggcctcaccctcgatggaggaggagacagtgagaccctagattggagccctagtaagaagatgggctctgcctcggggttgcagttgatgaaacgaggccttcattccccacaagggagaggctatttattttaattgtggtaaagtacacacaatgccacaaaccttccgcactatggagttgtggaactttttcatgcctggcaaacagacccccaagcccctgagaactctctccccagcgccttctcccggcagctacgcatctggctttctgtcctgcgacggagctgctattctggacgttttaagagaatcacgtgggacttgtctttcaggcctggcttccccgccttagcattccattttccaggttcatccacagatattctactgcatggacggactctgtgtggatcccccattcatccactgaggaagccactccttttatccccatcctacagagaaggaaactgaggctccaggaaggtcaagctcaaaagcacacagtgtgagcagctccaggactccagcctaggtcctaaccacactgccctgtgcctggacaccccaaggctgaagggggtgcctctcctacagccagggactgcggccagaggggagcgaccacgcagcgaggctgaggtgctgggagttgcggagcccagctccaggcccaggccacgcccagccgccctgccccaagcctgcctccttccagctctggaatgaaaacaaataaaaccaagagggacttcaggcagagtgaggcccccccagcatcccacgaggacctccggcatccaatgggtgcctggtgtccatttgaggagcagcccagcagctgtagatggaacagctcagatctgaagggggtcttggctttcaccaaaatgactgcgggatcatttctctctcccgtcccagcagaaagatgagctggggcctaggggagggaggcacagatggcccagtcacagagggcaggagggtctcaggatgcggcgctcatgagcatgaaggactagaaccttccgccaccccagggggcctgggacacagaatgttgccagacaaggattgtctaggcaccttgtgcaccggggacacgtggcaatggccctggggccagtcaccctccacgcatgacagctgtcacttacccaggcaaatgacatgacaggcggtccatccccatccacgacagctgtcactcacctggcacctctggttcctgacaacagtcagaggtgggacattggagctgcaggcaagtgtccagagcctgcccctcaacacgcagcctgcagcccctgccggacgccaaccacagacacgccagagaacagaacaaggcagaaaaaccaaaacataggcctcaaaactcgggggagcagccgaggtcaagggggcagcacctgagtcaggaaggccacgccaagtccaggtggctcagtacctcaggcctctgcccctcagctggcaaaggggatggggcgtccacctgccctggggcacgcagctcccacgccccctgcctctggagatgtcctacgtgtatgcgtccacctgccctagggcacgcagctcccacgccccctgcctctggagatgtcctacgtgtatgagacaaatgtgatgatcccagaaatgtggctgaaaactggacacacattcaagaccaggagcggggaggcacacggtgttcgagggtgaggccaggacaggcagggctgggcagggctggggaaactgccctccctggcccgccggccagaggatgctggtcccagggtccactaggaggatctcactgccacctcctccattgcaggctgggggaccctctcctactccagccactgcagaaaggatccccctgtggaaggatgaccctggaggcagccaacacagcattttttaaagtccttaacaacagaagacaggcaggcaccccctccccacccctatgcagatttcaaagaacacagggctgggaggccttgaggaaacttggagacgggctccccaatcctgggaaggccacagcccgcaagcacctggcgggtcacggaaagataccgcgtgttcgcgctgcctttgaacccaaaagtacaaaacaaaccaacagaaatactgatgacttcagggccaagctggcctaggggacaaggagtaggtctgtgagaatgatttgtcttcatccttacacaaactctgtaaagactgacagatgaaccccacaaaacagaaacactgtttccagcagcatcaggattgcaaaacctgcagctgccaggcagcaggagacctaactcaggggcgcagccgctcagtctggcccaaagttcaagctcccactgcccagtcctgtcccctccacggtcctgtatttgtcattcttgtttatcttttggattcagaagccaaacagcgtccccagctccaggcaaagagtccttcagaacacgaagcttcaggggaccaaaaaccgggcacctgagcctggggctggccccggtgaagaagggggctcatcagagctgagggggtcagggcaggggagttcgctgggtttagggtctcctccagccagctcctgaccccagtgtgagagcaggtctgcaggtcccggagcgcccaccccagccgcgtcaagtgggcacatggggaggggcactgaggcttcggaagagctttcgtgccaggggtggtggtgtcggagaggcgagctcatggctccaccctgcaggggctgggagacatgtccgccgagcacttcccacttgccaggcaccgggctgacagccgggtcctcggccaacccttgggaggggctcctaaaataccccctttgacagcggagaatgcagggtccagagaggcgccacgggtctgccacgaggtgctgagccaggatctgaacgcggctgtcagaggctcaacgctgtgtgtgcggtctccaccctaggaatgtgtcggccgctcagtgcccaaccacacacgaagccaggcccagaggagatgggtccccaggcaggggctgcatgaggacggctcggctcccagggcagcaggaaggagcggacgccgcagccgtccggaactcggacagaggatgttgacagggagggaggacaagcaaatgaagacttcctgcagcagagacacagagcccggagccacggccgccggcaggacaggcagccaggcactaatccgggcccggccccgcctccggccatgtcccagagccccaccactgacctctggcccacgaggacctcctgctgtcagcctgctgactttgccagggccccgagctccccaacaggccccagctgaactcactcagctgaaacggcattcggggagcacaggtgctagtggtgaggggaaggcggcgccagctgcgcaccccaccgccctgtcacctcatcagggagcctgccggcgtcacctgaaggcagccctgccttctgcctgccttctctctctcatctgaaagtgccatcttcctctctccattcatccttattctgtgccccctccagaaagccagcaacaccaagcacagggtttctgcctctgcggctcaatgccacgagccagtgcgcgacacacagagtagggtggagaacaggctgggccaccagccacccgggagcaggaggcccaggaccggaagccatgtggccagagggcagagctggtcagccctggggccatctctggactcaggcacctggttctctgtctcccaacctcccaccaacccaaggggccattttgccggtggaggggggaagtgaatggcgctccagaggcaagagacctgcacgggctggcacgaggcctcaacccccacacagctgcatgacctcagactggcccgtcacctgtccctccttcatccattaaccagggcagagccgcccccacctggtgctgcccagagtcttccaaggaccaggggaggtgccagtgctgggcggtcctgaaacaaacccacccagaatagagaaagggcatgtgtcagggcagaggggccctggcaacaagatctttccccagggcactggggtgctgcccccgaccctgacaccgcagaggctgatcatcacccagctgcccgaccagccatggggcatggccacctctctggaaccttctatcacgcatctccctgggtctcagactcatcatctgctgcagggaaacaccatcccctgcaaggcagagggaagaacaccaagcaggtggcccagtgccagccaggtcgagctctgcagtgagcggcagccgctgccttatgtctctactcatcagagctggtggcatgcagcttcctctgccccaactgctgctggaacgcagatttcaaaaactgcaacaccccttccagcaatgatccaggatgaagcactgtggcagcgcctccagtctgtggccacacagagccctctctgtagaacaaccacctgtctccaacccttagctaccaaaagccatctacttttcagggcatctcaagtaccacctcctccgggaagctctccgccatcaccctgcccccagggatctaaatacctcatttgctgaggactagcacagcttgctgttgaccctgccaacagcaaagcctgcacgtgccccatcttcgcccagtcaaacccaggaggccctggggagaagcaggagacggggtgaggccccttcttcagcgtcccgtgttgccagcaggttttcctcactcatggtcctcatgtgagtattaacagctcccttccccatctcagacttaggtgttgtaggaccatctggctcacctgattctgcttgccccagaatgcctccttctgcagacaggcactagtgaccacgaccacaccccccactatacccgtgcagtgtccaggtgcgcccagcagcgcgcccagggcttcaccttccacttggcggcgagaggggaggggaagagaggtgggtagtgaggcggcagtctcaggaagagagccactccctcaggccgcccgctgcactctgctctgatgctgagggagggcaggcggcgggtgagggccggtgcccttcactgggagtgagccgccgggctcggggtgagggtgccgagtcctgaggctcagtgggccctgctgtggggtagaaactgcgctgggcgccagacacacactttttgcaccaaatctttccaagagtctgcaaggtggccaccgtcatcccatttcagacaaggaggttgagctcgagggacacggccaccaagaagatgctatgtgtggccaagcgagtgtggtccccactgccgcccctgcgggccactcatcgtgtttccaagcatttccaaggatctctttctggcagtgtcattccagacacgaggagcccggcctctgtcaggaaaatggggctgagagcaaagccccctctagactgccccaagggcgggggtgggggtcatggaggcgctcagcccgcttcctggcacgaagagggcctgggagaaagctttgctcttactgagcacttgctgttggaccagcccctgccaaaggctttagatacaaatggaacagtaaatgcaacaaactgtgcgacccggaaggggaaagcccgggggaccaagagcccttgtcaggggactcgagcaggcctgggggcaggaaaggcttcccaggacaggcctctaagcagatggcagcagtgagccaggcaagaaggttcccctccagggaactgcaggggaaaggccctgaactgggaggcacaggaaggtggccagtgtgcctgaggctggggcaccgaaggccagggagactcggcaggggcgacggccggccggcaggagggtgcctccagggcaggagcaccaaactgtgcatggctgcagcacacgtggccgcagactaggcttgtggggcaggaggccgcaagaggggcacctgggacggggcacggccaaccaggctggcagggcaggaggccacaagaggggacctaggacggggcatggcagactctggctggcagggcaggaggccccaagagggggcctaggatggggcgcggcagactggctggaggggcaggaggccacaagaggggacctaggacagggcgcaggagtctctggctggcggggcaggagggcgcggcagactccggctgccgcctggttttggagggctggccgctgtgctttgcagggcccaccacctggttttgcagggcgcgccgcctggttttggaggccccactgcctggtttcatagggcccgccgcctggttttgtacatcctgcaagctaagaaaggtttttacgtttttaaatggttgagcagggtggtgggggaagcgtaagagtaatatttcatgatatgtgaaaatgataacacatttcaaatttcattctacaaaaataaatttcatgggagcattgccacgctcctccgtttacagaccacccagggctgctgtcgtgctgcaaggggagagttgcgtagtcgtgacagagaccgtctggctcaagaaacctaaaatatttaccatccaggcctgcgctggaacatctgccgccacctgctctaggagagagacggcagtggccgggctgggacaccggcagagaaggaagtgacttcaggggcagtcaggagggagacctgctggggcctcagctaggggctcgggtctgggcatctgcataaagccagggtcttccacactggccccaccaggttgccaacgctgtccctgtcctgggagtcccacccctcaaactgggaagccacagcccacagacatggcctggacacagggacaaacatgtgtccctacaagtctcctcaaaagagggcatcacgctgcccaccacccaggccagagcccagcgtccttccaggaagacaaggaagatttcctccaggaggagacatcctcatgacctgcgccccatagcaagaaagggctcaacagaggcacagggggtggggcggatgctcacccacgccaggcccccaccaaggtcctgcctccatgagtccaccgccctgaggccagggccccgacccatctccaagtcccaaaccgcaggcagacacgggtcactctcacggcggcccccacacctcacacccagcattcctcccggtctcatcctgccccacaccaacgccaggatttttgcaatcacaacgctcggcagagaactctctctcttcgccaacgccaggctatgctgtccttgcagccccgggtccttcctactgaccccaggcctgagcctggaatcccactcaacacagccctcaagtcccactcccggtcagtccctgtcactaacagccagggctcccaccccaccccaccccaccccacgctccccggctcctgcccagcaggaacgccagtgctcgcaagatgagtgtttctcaccctcattttcgttactgtccctccaaggaggcttttcagatatttttcctaatctccctccctgcatgaaattttcatactgcaggtgcactgtttctgtgagttttttgttttttcttttgagatggagtctcactctgccacccaggctggagtgcaatggcgtgatctcagctcactgcaacctctgccttctgggttcaagccattctcctgcctcagcctcccaagtagctggaattacaagtgtgcaccaccacacccagctaattttttgtatttttagcagatacgggggtttcaccatgttggccaagctggtctcaaaatcctgacctcaggtgatctgcctgcctcagcatcccaaagtgctgggattacaggcgtgagccactgtacctagtctgtctctgtgttttgtgtggcatgcacatctgtagtttatttgtgaaaataagatttcttctgactgcagtggctcatgcctgtaatcccaacactttgggaagccaagacatgaggatcacgtgagcccaggagttcaagaccagcctgggcaacatgcaagctctcatctgtacaagaaattaaaacattagctgggcgcggtggcacacacctgtagtcccagctacttgggaggctgtagtgaaaggatcccttgagcccaggagtttaaggctgcagtgagccatgatcacaccactgctcttcagtctgggcaacagagtgagaccctgtctctaaaaataattcataataagaatatttcttcatccccaaagatttgatttttgccccctcaagagcagtaatgcccctgttgaaaatgcataggctaccagcatggccaacgtgtcgaagccttatctctcctaaaaatacaaacattagccaagcgtggtggcaaaagcctatagtcccagctactcaggaggctgagatgcgataattacttgaaccgggcaggcaaaggttgtagtgagccaagattgtgccactgcattccagcctgaaggacagagggaggccctatctcaaaaaaaaaaaaaagcataggttaagtaaaatatattattataatcagtgctacctatttctttttgcttttttattgcagccaccaaaattctgaaaatacagatgtggcttacattatatttctatctggcagcactgatatagacagaaaacaaatacccatgtcaacatgtatagacacatatggatacagagacacatacataaataaatacatacacacacatacaccaattccccaggtgtgaacactgagagtgcctggaagcaggaacaccccagcagcactgagcacacctcatcctatcttgccttattgtgtgtgtgtgtgtgtgtgtgtgtgtgtgtgtgtgtgtgtgtgtgtgttttgtttttgtttttgttttttctgagatggagtctcactctgtcacccaggctggagtgcagtggcacaatctccgctcactgcaacctccgccttccgggttcaagcgattctcctacctcagcctcccgagtagctggaactacaggcgtgtgccaccacccccggctaatttttgcatttttagtagagacgaggtttcgccatattggccagactggtctcaaactcctgacctcaaatgatctgcccacctaggcctcccaaagtgctgggactgcaggcatgagccatcgcgcccggccctgatcttgccttctaaatacccctctccactaccaaggaaccagagctccttggacaaacagctggttcttaagctgggacaatggaaatgcaaggtaagcctggaacatcttgttgaccagcctgggttaccagccagaaagtcaggcacggtattcacatgtcctctgcagctcgaagaatgatgaggacgaatcaaaagacacagggaagcaagccggtgtaacacagttcccactggtcaaacctgagactatgtgagcatcaatataaataatgatggtaacaggttatatgcatggaataaaataggaaaccataatccaaactggagacatggcagcaagggacagaatgagggagggagagagggaaaagaaaagcagagatggatgagaagaaaaggaagaaaagactgagagagatgagcagagaaggacaagagaggaaggaaaggagggagaaaaggagaagcaaatatcaagatatttatattgactcaaagtatcttctttaagtacgtgttaacagcaaacggaaaccaagtaactttacagtgaaatcaagcaaactccaccttcaccaagtaactaaacagaacatcaccagcaatggggcacagccaagccctggaccacctgctaggaggcaagaaggatgcagcgtggaggcggagctagacccctacagttgcgtgacctgacgctgctgatgggggagcattctgtaaccaaaggaggctgtaaccttccaaagagtcaaggtcatgaacatcaaagaaaggctgaggagcagccccaggttgacagagggggacacagccacaggcagcccagggtcctgaggctgctctatgctatgaagggcatttgctgggacaattgtggagaagtggacgggtcacggattgctgctgttggctggatggagacggattgatgctgttggctggatggagacagcagtgctgtggttacagaggagaatgcccttgtttgcagtaaacgcactgatgccccatacttaccctcaaatggttcaagaaaaagttacctgtgttgtactcataacttttccaatgactgagatattttcaaatttttttagacaataaaatctatcccccccaaaaaaagaaaagacgcccttgtcttctttgcaaccagcattccctcctctgctcccggcagccctgtgttgtggacctcggctacaccagcccagccccttctgctggcaccaggggcccttcgggcacttccatgtcgcttttcagtcaccaagcacctcatcaacatccactggggtccttgcgtgaccagaagcctcatgagagcagggacagccccggcctgttctcctccctccccttggaggcacaaagcctgcgtggcacacagcagggttttattattattatatttatttattttattattatttatttattatatatttatttatttattatttctcgaatgaaggcacaaggttctgagggacccagagaggaggaagcccagccgtggccctgccttggaggggctcagacctggaaggggggcagccacacaaaggtgctccagacacactgggtctgtcattaggatcatccttcacactctccagctgtccagctgctgagttttgcagaaggagcagcaagggtatcgtgtgatgaaacaaagagtttcattacacgaggccagagagaaacctggaacagtggaggagtgagatcgaggttcaaagcgcgtggaggacagggtggggagagggtgaaacccaaggaggctgccaaggggagggagcccctataccagctcctacaggaagaaccaggctagaaggagagaaggtcttccagcaatggcacagctcacgatggcacacatcaaaaaggcccggagggggggatgccaaaaccatcgccaggctggcgtgtccgggaagaggcagggagcacagggagttgaggtggaggtgggggacagactctggcaggcccagggccaagcctttgcgtggtgtccagcaatggctgcctgatgtgttttacgaggaggaggccaccaggacgatgtgggcaagtcagaggctgggcggcgggtggtaccttaagggtgcaaactgctgatgctggcacaggcaacctcgggacctcccaaccgaagctgctccagacacacccgatttctcgttagggtcagcagattgtggccatacccaattagtttaattaaacccacggggcttccaggcacttcagataaaaaacaaaataaaataaagtagatcctgccagcttcagaagaaatgaccaggtgggcaactgggatctctgtgaccacctcctagcacccggctctgcacacagcaggtgctgcataaatgcacgttgctatgatgctccattagggcaaataacccagcccagattaaactcaaagtgggaggggcgctccaagtcctctgaaaataggatgtcaccatgagaagccaggggaaattctggaaggagggaacatcatagaggcctccgggctagacggcctcatatgccatgactggcagggaggtgggcaactccccgccgtgtgcgctcgaggggccctgcaactcaccagccagggatcacaggcacccaccccccacccctgccaccccatgaaaagagacacacaccgtgacaacccaaaacccaagaatgaggccagggacatccctcagaaagtccacaagagagtaagccagcttaggaaggcctgcagtcatcatttatttaaacagtcctgggagggagactgcaatccctatgttggttttgccacttactcctctgggcaggagtggtggggtgatggggagtcactcaagctctccggaaccttgacggcctcacctattaaacacaggcagcaacccccacctaggcttgtgcttaggccacagcagggcaggtaagaaagggcagatgtgatttttctatgacccaaccaccaagggtggagatgacttcttccctctcccatccccaccccttaagaaacgtgagtttcagccggacgcgggggctcacgtctgtaatcccagcactttgggaggctgaggcgagcagatcatgaggtcaggagttcgagaccaccctggccaacatagtgaaaccccgtctctactaaaaatacaaaaaagagctgggtgtgggtggggcactgtggctcacgcctgtaatcccaccactttgggaggccgaggcgggcagatcacaaggtcaggagtttgagatcagcctggccaacatagtgaaacgccgcctctactaaaaatacaaaaaatagctgggcgtgggccaggcacggtggctcaagcctgtaatcccaacacttagggaggcctaggcgggtggatcacaaggacaggagttcgagcccagcctggccaacacggtaaaaccccgtctctactaaaaatataggctgggtgcagtggctcacgcctgcaatcccaacactttgggaggccgaggtgggtggatcacctgaggtcaggagttcaagaccagcctgaccaacatagagaaaccccgtctctactaaaaatacaaaattagctgggcatggtggcgcatgcctgtcatcccagccgacttgggaggctgacgcaggagaatcgcttgaacccgggaggtggatgttgtggtgagctgagatagcgccattgcactccagcctgggcaacaagagcaaaactccatctcaaaaaaaaaaaaaaacaaaaaatacaaaaaattagccgggcatggtggcaggcgcctgtaatcccagctactcgggaggatgaggcaggagaattgcttgaacccaggaagtggaggttgcagtgagccgggaccgtgccaccgcactccagcctgggcaatagagcgagactctatctcaaaaaaaaaaaaaaaaaaagctgggcgtggtggagcgtgccggtagtcccagctactcaggaggctgaggcagcagaatcgcctgaacccaggaggtggaggttgcagtgagctgagattgcgccaccgcactccagcctgggcgacagagcaagactccatctccaaaaagaaaaaaaaaagtgagtttcccagaaaacaaacaccagccacacagagaaacgaagtctttctcccaacccctgtgtgcagccagatgcagtaaagtggtttctccacgttgaatgaacaggcggggctgtcacagccaatgtgagggttaagggagcatctgcagccgtccccgtgcaggcaacagccgtacaaaggtggcccaccctccacgggacagaggagtggatggcaagatcagcctcagcgacacagggcactacgtgccacagtccaggtgacggtcatttcctgggcactgtgcgaagggtgtgccttctgtgcctgcccttagcaaatcctcacagcatggctacgaggggactgctatgactgttctcatgacagagatggggaaactgaggctctggaggtcgttgcctacctgggaggggacagtgccaggattcaatcagagcggagagccacacagacacacacccatctggtcctcctaccatccaggcccctacacgccctccacgagtccggcagcagggcccctaaacacccctctaccggcccagcagcgggacccctagacacccgtccaccccccagcagcagggctcaaggggcctctgtcagggttcgtattgctgcctggccaatggctccagagaccccaggaagtctctggcttgaacttccagtgcaggagctgagccaagccacctgccacagccacggccccctcctcttcccatcttcccaaaccacagctggggaggggcagcccccggacccagcgagtccaccaggcaaggctgggctcctcccaagcctcctctgtgcggacccagctgccctgcctctgccctgagccccagcctgcaagcagcagggaatcctgcccgagcaagtcagcctgggcagcccctggaactcatatcaaaggcagccaccttggttcgaggcccagccctgctccccaacagctacccttctcctcagtttctccagccataaaatggagtccagacttcccagtccccgtggggctctgagaacagatccggggaagccctctgcagcagtgaccgccacccccgccacctgcacctgaccactgacatcctgcgggaagaggcgctggctcccagggaggcctctgagggctcctgctaagccggtccaggcagtgctgggtaatcattacccagtgggaaggcggccccttcccctctgggcttgcctttgtcagcgccccccaacccggcagagaaaggcccggtctcctaggaaacgcagtcaccgccaaagggcagaggcctcgctgcccagcctggaatcgctggtgactcactctccctccttcccaggaaccacgtcctaagtcccactggtgaatggtccctctccacatggagttgccactgcgcgcggtgaggggctgctgagctggctggaagaccgcacctcctcggcgctgggtggacccggctgccacccgctctgcctcccccgacctcttctaagctgctcccggtaaggattccgcgacccccggagaacaggacggaagcctcgattctctcaagtcttagccaagttccctcttaagaggccaagaaaagcagcttcgttcggctgggcaggcattttcctgcctggccctgcggccgcacgcgtgcctccgccgcgacaaaggccacactcagcgcccgaaggaggggtgggggtgttgggaaagcgatgggggccaggactggggccaagtggccctggggatcctcgaggcggctcgacccgggagccaggactggcgccaagtggcccgggtccgggtccgggaagaggcggaggccggcgagggggcggtgcccggggccaacccagctccctccggccccgagggctcccgccccgcgcccctcccgggccctccagccgcgccccgggccggcgcagcgaccgcgcccgctcttccaccggcgtccggccaggaggcgcgaggcccaaggatgcgacccacgacgcgcacacccggctcggcaggctccctgggaaatgaggggccactcgcagggccccgcagagcgagcgcagcgccggagcctcccccatcccaggccgcgcagaccgcggaaccggcgcaccagagcagtgcccgcgggcggcggcggcgcgacccaggctgaggggactttggccaacttcgcgcctcctgaggtcgcgtctcggaggcccggggcgcaccctccagccgcccgcccgcgtcccggagcccggccgccccagccagggcgcctgggccgccgccgctgcgacctccgcgttcagtccgcgcgtcgggcagcgcgaacgccgcctccccggggccctcccgcccgccgggcgctcacctgggacatctgcggccggaagttgatgtccttgaggtcgatggagccgggggagaggttgtgcagcagctggcacagaaggaccccgtcgcgcagcgcctgcgccaggtcgaagaccacggccgagggccacaccacccggtggttgggcggcaggaccttgcaatcgatgagccagcggccgcactgccgccactgctccatggcgcccgcgggcccgaccggctcagggcagtgctcgagccaaagtgcagcggccgcggggcatcccgcccgcgcgcgcgcggggctcagggccggggcggggcttcgcgcgggctgccccaggtcccccgctgcgccgccgtgcgtcccctcctcttcctcctcctactcctcgggctcctctcgggccgccgctcccgcccacgtgcggccgcggggcgggcaacgggcagcgcgccggatctccccgcttcacacacgcaagtgcctgcgggccccgggccgggctccacgcagccagtcgccgcagcgctccccaatccgcgccgccgggcgccgcattctgcgctcggggcgccccgcggccgccgcggctcctgccccgcccgagacaaaggcccggcggggtcgctcgctccgcgcgtcccgggcctgggccgcccgcgtcgccgccgctttgttcgccccacccgcagtccccacgcccggcgctgcgactcgacgactcggcggctcggcggctccacggctccggggcgctgggggcgcagggggcgcggccacggccgggcggggcaggggcggggccggagcactcgcctggcacctccccgtgtcccaagcgccgcccccgcccccccacttcctgccccgctaccgcccgcgaaagttgcggtgggcgggggttgcggcgcaggcccaggtccggccgactttctccaagggcgctcggactttggggagcccttctccctgggggagcgacctcgcccgtggagtgatggccgggcgtccccccgggtgcctttggtcctccgtggaggtcaggaggtggtccctgtcgcgctgggcgccctcgcatggccgttcggtaacgacagactcgggagagggcaccgggctgggccgaagcttactgagcccccttggcccatcaagccgccccggcgggatacccgaggctgaggctgaaggcacacgggcccaggactcccagagccctcttcctgtcctccgccctggccgggggcccataggaagacccccgaccctgcataaaggccaggattccccagcttttggccaaagtcctggccactcgcagctgcccagcgggcagttcctggcgtccagggcggaatgcgtgacatgagtgagggcaggaaggtgctctccggcccagggtcgcagccggccccggtgctgatccgccctgatctcccttctaggccacaccctgggtggtgggggcgcggtctgtccagctggcaacgtgtgacggtaggaggggcttcaaggacaaacagattctgcaactgaaattatatggatcctggctcagctgccgggaaccgcgggttttcactgctgattcactgggggacaccaggcaagtccaagcccttctctgagactggctcagcccggaggctggggtgcggtgtctgagggctcccaccctggactccggtggaatcctgggcctgtatgagctggggctgcactgcagcccccggaccccttaccccgtggcttccctgcgcag

SEQ ID NO: 660 - DNA, 12780 bp, Homo sapiens
  source 1..12780: mol_type = genomic DNA
gatatcaatgctaccaccgggcacctctagtcagacagtaagatctgttggttttatttaagcaaaatgccttgaaaccatttctcctctccatttctgctgccacttcaccaagcaaccctcacccccatcccctacccccaccatcatcgcatcaccatcatcctctcttgctctcctgttcctatggaagtgtactcactaactggcatctgcctcagaatccgtgcactcctgttcccatgccacctcttctgggattctcccccagattgccagagagaccttgtaaaatgagaactacaatgattccatgatctccttgggagaacttttcagtggctcctcatcgccctgatggcaaaatccaagtgttatcaacgtggtattccaggtgctgcctgcattcctgcctcttctcccactacttgcactcagccatcctcactgcttcctctccattcccagctcttagcattctccttctcatacctttccattgaaattggttgactcaagaactgaggaaattagcatgtaggaggtttactaaggagtgcttcaagctcaacaatgtagaagggaaaggaaggaagcagtactggacagaagtcaaactgcatagggatcccaacagaggcctcagccattccttctaagagtttagaagatgggatgagtcttcaaatatatccaaagttggggtgcaagaaccaggcttatccccaggtctaccagtcattggaaaccaccctggaaagtcattggaaaccacttgagtacagtggctctcttcagatgaggcagtctccaatgaacagacagctgagagctgtctgccaagtcattaaaataataatttagcattttggtagagatgctgtgcttactaatggctgtgataccaagtctaaaggcagggggagtaaattccattatgcctgacccaatcacgttccccttcctcaggaaaggactttaggccaacaccgtcattttacagatggggaaactgaggcccagagagactctcagatagtcagctatctcaatcacagtcttataataaatagctaatatttgagcatataacttatcctaggcttgtactagatgctttagatgctttatccaactaaacaaccatgacaatcctatgaggtaggtgccattattactttcatttgatatacatggaaataggtttggagcagccagatgactaatttgtccaagattacacagctattaagtggtgtatctgggatttgaacccaagtcattctgactccagaaccataactagaaaccattaagatgaattactttttctctgtgcattaaaccagcatactacacattgtatgataccagggaatgctatgtatgtgtttatatgtgtgtatatgtgtatgtgttattgctatacatgttatgttgttaacacacataacagacttttttatatgaagaaaacttttacatgaaaaattttatatatattttacacatatatatgatgtgatttatttttaagaatgggtacaacactaccacataaagcacaatatttattttctgtttcagggtaagaagataggcaaatgtgtttctagaaagaaaattattttcatattagctagaaatcagagaatacccaagtaattttcagcttccatgtccattgcatgccaggttctctggacctggtggccttgctccttccagaactcatgtctcttcaaacagaagctttcagttccaaccaagaagggtgtgcatctgaatgcttttcagcaaacctgaagggctctcctcctcctttccccaaactaccaggtctgtaagggagcagcctctccaggaaggtggtccccattgagtttataaaagaccttccctgagacctgagaaaccaccaaagtagatctctcttttctctcctgctccattaaaatgaaacctccatgaaaatgaaaaagactgaaatgtaaagatttcccgacgtagaaatggtgttaaattacaatagcataatgtggtccaagaaattctaaactgtgtcagaaactgtggattaatttgtttaacaaacattcattgtattcctaccaaatgccaggccctgggccagatgcaggaggctgcagtgttttgggagtttgccatttaatacagtacttctcaaatattagtctggataagaatcactttggaaaagtgtttaaaatgcacgttcctaagccccaacctagtttctgattcatcagatgggactagggcttaggaacctggaattttagccagtccccagatgattctgaagcagctggtcctcagttgtatcttgaaaaacattgacctagtgtgtttttaagttttgatcagccatttaatcaagccacttaaactcaggatttcagggggttagaagagatatatgatttctaaaatccttcaagaaatcttaaaaagacttcttaaaaaaggctttctatgcaagaacagcacaccaatatgacacaatttcttttcaaacaggagaaagacactgtgtgtcatcatatggcttatgtggctgaagggaagaagttaaaagggtatccttggagccattcaagaaggggtgtgtgtgtgtgtgtgtgtgtgtgtgtgtaaatcatcaacttgtatagttaagctttgtgtactttaccctatgagtgtttacctcatggatattataattcaatttataaataatcatttttaaggatgtgtaagaccaaagagtgtaaggggtttaaagatgtcattctagagagacgtagagggaaagagttgggacagtggcaggaaaaaaaaaggaaggagggagaaattcaaacttcttgatgagggcaccaagtaaatcctcagcagctggtgtaatagatggctagatatggacattagcagatgtgggtgcaaataggctaaagaattcaggtaccatgatccagacactgtgggcacaaaaagaaggaaaggaggaaggaggggagaaagggaagaaggaaagaggggtcaaagggggacgaaagaaaaaaactgaaagaaagaggcctctggccctagggggagcttacaatcttgggttctgagcagctatgtggctttgagcaagttatttgcttcagtcctgtgtgagtctttaaaacggagctggacctcccaaagccaccatgaggaatagtagaatggtgtatgtaaaatgctatttgtaaactataaagggttgccaaatgctacttatgaatacattctggctgaaggttagaccaactgcaagtgtggataggagcatgtgtcccgtttagctctccaagtgacttcccacatctttcttgaacctgacccccaaactcacagggctttgctaagaggttttctccctttttcttttctgctctgaaacaatttggcggttgctttgtgcaggcctgagcatcagattcctttcagctcccccctcctgcagctgtttctccttccacctttccccaggcaggcccagctattggcatagagggtacctgcctcctcctccaaggcctgtgagtctccagttggaagccagaagcctccagggaccaaggcagcttactggaggcccttggggaaggagggaaaagaagatagtcactaaaattaaatgaattttctataaatgtttttaaattaaaattgcaattctttttctatgcagaagaggctctttaagaacaattgcactccctgagtggcaggcaaagagctcagcagctcttcccaaagccagggagggaagggaggtgagagcagaagttatgaggtgacttgtccttccctctttcaggggtaagaaagcaaaaaggagaaagagcaggaagctggaaggagggatctgcttggtgacttcccaggctgaggcccctgggagaggaggctgaatttgttgggaatcccaagctaggattttgtgttttcttttgttccaaaaagttatgccaccttctcccttccttctcacccctggagggtcccagccaccagccttgaagctgcagcgagagccacccactgccttggcctttgggaccccttgagcaggagaaaaaaaccagaaaaccaaaagagagagagagacctggaaggaagaagtaatggaggagggagacagggggaacgagaggggagcccacaccacagagagagaactccttaaaggaagcgcaggcgtttacgggacaggagcgcggaagaaaagagtagaaaaggaaaagcagtttcaagcaagagaaagtaaggagaggcggacagggaggggaagagccaagagaagccaagctgagggatctgcagcaactttgagaaataaaagtgaactgtctgtgggcggctgctgtgatctcagcaaaaagcggagctcaaggctcagggactccgccgcccacactgtgccccgccttattttggatgcctccaacttcagcttcaggcacagtacacgagtaggggcagtaaggcctggctagggccggtgccgcacgggagctgcgggtccctgcaacacccaggtgtgcaggcgctacaagaaggagccggggccgctgcccccgcagcgcggacttcgccccgtgctgcacacgctttagaagagcgtgtccggaagtgtcctccccggccctcctcgcttcccaagatttgtttgcaacgtctacacccgtcaccaccgcataagcaccagggtgaggaggtctctttgcaggaattaatatcgatttcagtctcctgctccttcaaagtttctctttgacgatggcgagacttatattctaagtcagaagaaaataaaaccttgcctattctgggcccatgattgcacaaaatccaaaatgctgccggcatgaagatgcagctggaagactctagaaacctagcattaggaggcagagactttatagtgcccagagatgagttcctaaataaactaagaattacgcagtgggaaattaaggaggagggtctgaggggccgacctcagagggacagatagagaaatcgagagcgaaacactcaaggaagtggaacaaatcgtcgtagccaggcgtctctgcctctccggaaacccgaaatccgcccaaacctcatcccaggcgctcacggtaccagtcgcagggccccgcactataggggctgccaccctctgcccccggagtccccacgccgagactcatcatttgctggctctttcttccttttcttcttttgtttttttatccttcaaatataagacaaaaatacacctcatttatcatcatagatatatatatttcactctcaccacataaatacaaaacatccaaatatccaaaacattcagaacaaagttagtagcctggattcagtgacacctacccgcgtttgaatcgttcattattttcttcactatttgcctagaaaaaaaaaaaagatgaaaaagagggggagagtttccgacgtaaataatttacaataaaattactattttaaaaaagtgtttttcgcttgcttcagatggatgaatacattctagacactgcggcacctcgcagtctgggtctgtgattttggttaaaatgtgggtggccgtggctgtagggacgatcgccgctgcgcagggtaaggaaagagggtgtcgcggttcgtgttctgatttgggaccactgaaaccctaagactggggaggcgaggggagtgtctttcctatcaatcacacaagacgctatctggactccgagactactgctagaggaggcccgaccacccagcggcgtccctgcctccccttccgcaaagaactgctcagaaatccagacgtttcctgcgtgcaggaagggttttgtgaatccgggtgtttgggagaggaggcaatgagtgctgactcgttttccaaaccgagcaattgtgcccgaagctacgcgcctgggaggccgtagggtgaagcgccggctgcgcaggctaccgccggcagccgctttgctctttcctggaggagtgggaagctgtcggccaccgccccgaacaggctcggagaaaagattctgaatttcctttgattagcggcgttaccttttcctttgcttttcccccattaaattcctgtttaaagttacaacacccagaaccttaattttgcattgccctgtggggcattctgtatcctgaattttcttacaccttccaaatttcatcattggaagtatttaaaaactggttccacttcatctggttttacgtagcaattgcttttattgctgattagatcaaatttatcagtgtcgttgcctactacgacgtttgttactgtttcctggggtcgggggtggttgtgattggagttgccctaaaggggagaaaaaccgcaggatttgcccgccaggaagctgtgttgtgtaccgactatcccgagaggtccgcaaagcggggcccaggggctcccacaagccctggtttccctggcaagaggaaggaacgtcctccttttttggtctaaagaaacctggaagcccctggggtctgcgcgcagttttcctctttcaaatattcctaggaatagtcggcagcggcagcagccgcagcagccgcggatctagagcaaacgtcctgtgctttggagttagaaccagtcttttccctcctgggctgggcacggggtcagggcatcaggttgactaactcgggcatttttcccaattctttggatcgctcctggattcagaaggaagttgggggttggggaggaatctcagaggaaaggtagtagaaaaaaaaaatagcccgaatgagatgaaattggtagcagagtctagtgggaaaggagagctgtcagaggcctggtgggagccaggagcccagcgcaggagctctgggcacctaatgcgcgtgagtccataaatatcaccacaatagatactataaatataaatacagggaaacacttaaaatcagtccagcgcttttttctcggccccttctttattgttggtccgggagtaaggctcgaaggccgaggagctcagatatcgggcggagagttcttgcaaattcccagctagcgaaccagccattgttaacggggcggaggacaggcggctggcgacggagccgagcagcgagggcaccggcaggctgaagaggctgtggcccgcggccggggcgcctgcgtgcaatccccccggcccggcgggcccgggacctggagcaccgcccacagccggcgggtgcggggatgcagcgcccgctgggcccggggcggcggcggcggctgcggcggccgagcctgcagcggcgcccgcgcccagggccggcaagctgggcccgcgcagcgctgagccgagagcgcccgtggcgcaaggcggcagcagcgcaggcaggccgggcggcgacaacaggcggccctgctccagcagccgtagcacgctgcacgtggccgcggtctccgacaccaccgagcgtagctccgagtccttgccctggtccttcttctgcttggtgcgccggttctggaaccagaccttcacctgcgcgccggggtgcggggagagttggagagaggggcagggaagaccagcgtcaaaggaagcgagctcccggggcgcgcggctccggggctctccccaagtcccagccctatccgcagccccacccagcagccggaggggtccgggccggggcgctgctgggggagctggcgccgccacgagggggacacagctgctccaccgggctgcgcttccgggtcagggaagcaggcccaggcaggcgccgcttacacagaacaaagtaataaaatgcccacggcaggaactcgaaggaagaccggaaagggtttcactggcttccgcgctaccccgcagcggtgtttggggctcacagatgtgtgaatcagtgcagtcccaaagccggaatttccggtggagggtgtgaggccctagggtgcgggtgcggtgaaggaagagggaagaaggaagagggaagtgggaagagaggcggggagggagtattgcccagcctttctggacccaggcccctggcccaatgcgctcggatttagtcctagaagcactactcctggtgaaggctacaaaggaccatttcctgcttaagacgtgaccattagctagcagcaagcagggaaagtggctgcaggagaataatatgtgcgggagactttatgtagaccgagatttctgcacctcttctcaccagatagctgcattgaagggtctggtgatactcttagtttatctctccactggtctgagtcatgaacttggaatcatgggagaaagtcaggaggctgaggtggattgaatattccccactaacctcccctctcattcttctgcccctctgcaggcctagcagtggcccagaagagttttgcagcaataggcaaagactatcctatctagattttataaactaagaggagtagtagcagagagaatagaaaaagctaccataccaactcaaactcaaaaagaacacccctatctgttctgtcagtcctcagctttcagcccagatcccggacctaaaatgctctccacctgcttcagggttgggcatggggaaaaggatcagtcttcagaaagaaggctgccgtagctaggccaagctggtgacatgccacttggcaagttcttgggtcctctcctgggcccagagcccacatggccagctccaaggggcatcatatggatttaatgtaaagggaaagatctaaagcacaatcagcagtactggcttctgggtcctagatctccttcccatcacacacctcacacatcactggcccagaagacagggtctcctaggtgctcagggctggggccagctcagaatggggaaagccttcctttaagggtcagggcagcctgatctgcacaggcagatctccaggagggcgtacacctaattcctgggaatcacccatggtgctggggcagggggtgttagatctagcctcactcctgtagaatgggcctggacgctgagtacagctgggtgggcccacaaggggtggggcctagaaatctagccaaaatggggtaccccaaacaagggcaaaagtcagttctttgtagagcagaagctcgaaggaaatgctcaaaaccgggggacaataaaaattccaaaaggacaggatttggggccttctgggcctaggccaaggtggataaaacatgggccctggaggatttggggatggcaggaatggtggggggaaaggatgtattatctaggggaaggaatccttaggcctgtcttacccatccttcccatctcctccacctcccaagggtagttctgtccagagcaggttaggaggtgaagagcaggctaggtaggggtggtggggaggaaggctggtgcagaactgtgtgcggcctggtcgccgggtacctgggtctcggagaggttaagctgccgggcgagctcggtcctctcgcggcccaccacgtactggcagcgctggaactccatctccagccgatagagctgctccgcggtgaaggacgtgcgcgtcctcttaggccggtccaagtccaggcccttgggcaggatgatctctcggatggaccccttggcatctggggaaggggagatgtcagccgccagaaccctcccgtccccctccacctccttggcccgagctggatttggggacacagtccccagaagcgtgcagttttggggatggggggcggggtgcggagcgcgaccacaaccaggtagcaaagacactgtgtggagggcaaggggcctaactccataccgctgaccgaaggagggaccacactttgtctttttgtagagtcctccagacaggggagagaaaaaaatccaatcaattccacataggcggacgtttcttccggcctgggggggcctcggctgagccttccgggtcccctgtagcctgagggtacccttgtcgccccgcccgggtcctgcgggccccagctctgggcttgccgaccagaccgtgatccagacgtccccacccccaccctcgagtctccttccctccggagtccgcgcggcggaaggaggagggactgagtcggggccggccgggcccggagatctgctgctggctggggcggcgccgggccggggcccggcctcgcagcctccgccgccggggctaagtgcacgccgcgccatccgagagcggcagagcagagcaccaaagcggcaaccgcggctccgtaaccaagcccagctgcctctcccggcggcagcggtcgggcaccgatcgcggccgtggggtcctcggcccagtgcactaactggcagggccgtagcccgcgatcggcagctgttctccggggctcgcgttcccccttgggtgcgctcagccctccagagcgcgggagtcccctggccggctcccggcaggtcgtccggcccttggagcgcgcacacctcctcccggagttttctgctcctttcccgggtcggaggccgcagcccgatgcccggccgcacccgcgcagcccctcatctccccccgcagcccggtcagcggggcccctccgggcgtggagggccgaggcccctggagagcgcaccggagagtcccaggcgcttgtccccagccggactcggggcggggagggccaacaactttctcccaagtcccagccggcactccttcccaccggcctgtgtcggcggcagcgcgcagctccggccccggagtcgaccccaaagaacgcgcctggcagccctgcccatccctacctcggaccaggatccggcggcagtaatccgggtccgctgcggaattggatttacttttgttacaatcctcagcagcgcccgacgctgagaaggcgccctgcggctccttgaggaaggcggctgggaggttcccctccgcgcccttgctctcccgactctccttgtgcgcgttcttcgagacccgggcagcctcggcgtccgagtggcatcgaacgtccattttgtctggtttcccgaacataggcaagaacaacaacaaaaacagaaaggaaaaaaaaagcaaaaaaaaaaaaaaggggggggggcggagaaggaaaaaaaaaagaggaaaaaggggacaaaacccccgacaacgcggcccgtacgcccggcccggcgacaggcaaggggcaagaatgaatgtccccgcggggaggcttcggcggccgcgcgcgggtcagcggcgacgggagagtggcgcgctcgccgagaggcggccagtctggtccaggatcctggtggagctgcggcgaggccgcctcgtcagcacccgcgtcctctgagcacgtccagtgtccccagcctggcgatcaggtagcgaacagcgcaactccgaaatgctgcggctcccgcctgtttctgagacggcgagttgtagttgtccgacacccggggggacgcacactcgctgttgcaattgattacgggtaatttcgcagcccccacgtttcggttacctcatgaatacactaaattgtttggataatatatcagatcgtaatggatggtttctgtccttgtccccaatcaagtaggggtttagccagtgaataaacggaaatgattggtcttgctttcaggaaacacacaatcaaagacccacacttccagaaaaacttttgacaagattcatcctgaattgttagtaccattagcaggcattattaactttccttttgcctttgaccctcctgctcacatactggctagaggggttttctccacactcgccagatagagctgaatgagggttgggcggcgggggggtgtggggggagaaaaaaaaaaccctgcgcaccctgcggcagaagaaagcagttgtctgggagtgggggatgggggacagagcggggggagaaagttttcccaaaaagtatctcccttgcactctaaaaaagccaagattttcccctaaacaactccttcttaacacacctcgacgcagacagccatcttaaactgccacctctcttcatttagttccagttggattttttcatgcctgcacctccagcagccctgaggcagcccattcaaagggcagctttgtactcagagtccagcaggagagagagggggagagggagagacggccgagaaatctcaactgtgagatctgcttcaaaaaaaaaaaaaaaaagttttcccctagctatttcattgtctctgctacaatatctttgagaaaagcaacagccagtaatccaataagagcattgattaggctacaatgattcaattcaagcgcatggccttgtgcaaggagcatgctccagcccttctcgtcaccttgccggggcagaagccctctccacgccgctctccccattcattcctttatgggaaatgcggagcaaaaggagtgaaagatggcaattatctaattggactattaacaaacagtcctctgagtgcggcggtctggcgtggctcctgggcgggggaagggccgtgttccctgccctcattcacaaagagtgcaggggccggggaggaaaggggttttttaaagggggtgggtggggggagaggagaggtgggaggtttggctgagaatttttccacacaattccaagaatggggcggaggcggggggaggggagggggttggggagggggtcgcggcgagcgggtgggaggaaggccgggagggggaggggtgcgagtgtgtgtggcgggcccctaggggctccagctcgcagcgacgcgcgcaccgtccgcacctcc

SEQ ID NO: 661 - DNA, 35855 bp, Homo sapiens
  source 1..35855: mol_type = genomic DNA
gttaatcactcaattaaataattggtgtgtgtcccccccaacctcaccttctgccgggaacatctggcatcggaaacacacaaccattcacatgcacattggacacacactatgccactgaaacacgcacacactcatacacctgctttcccactcacagggataatggaggctgcaccagggacacactcagccatgctacagccactttcacgggcatatccacgccagctctcacagacacccttaaccagattattggacagaccaaagcaccctgctcacgccagcaggtcagaaaaacgaaggaaagtctgagattgtagtgctttaggggaagggtcacaggccttgttgctcgtgcacacatttgcacacacaccttcgttctcaatctttcgtccaggcccccttctgagtcaaagaaggccccttctggtgcgttgagagagacactaggctcgggagagcgctggcctctccagtaaatggtggggatccgcacgcctcaaagggctgcgccccgggaccccagctgctccgctcctcacagcctgaccctgcttcacttccagccgtgctcacctccgccctttacctctcctcagcctcggagaaggcgggacccgggacagcgacagagcacggagaaagctccgcgggggaaacaaggaaatccccaccttctatccctgtctcgtggtgcggtcccctgtgacggcctcagacctgcggggaacccaggactttgccgcctaccacggtctcagccttattctcgagcctctgggcgcctgcaaccggctgtctgtctgtgtgcctgttcactctcccccggggatgcgggtgagtcggtcttcttgcctcactttgctagccttattcgcccactcttgccttgctcttccaggagggccgggggagggggtcctccggtctgggttcatgagtgtgggtgtgggtataaatctaggggttggcgcactgagcctaggcctgcgcccccgcctccagcacccccaccgaccccaccccgccaagcgcccgagcaaggccaacctcctgttctctgctaggtctctccgaggtcgccttctttgcgcactttggttattgatcctgctgaaccggccggagcgcagcggctgcgcttctctgggaaagaacggagtggggaggtgagtaggctaggggaacggtggaggggaggagaggttgatcaactttaggagggggtgtagggcgttcctcagggccgccccagtctccctctgccgggcttggagcagggctagactaggggtggagcgggaccaccgctcccctccccctctccccctggcgcggagccccggcgcagctgggagtcttggaaacctgactcccgcccaatcagcagggaggggaggagcagcggccaggagcggggcctgaggaggaggagtcgagcgggggcgcgaggggcggggagcggcgctcccggccagcgtaggctggctccgccgtagaggggttggcagtggcggtcagcatgggcgatgggggcgccgagcgcgaccggggccccgcgcgccgggcggagtctggtggcggcggtgggcgctgcggagaccgcagcggagcgggggacttgcgagctgatggcggtggccacagcccaacggaggtggccgggacctcagcctccagtcccgcaggctccagggagagtggagccgacagcgacgggcagcccgggcccggcgaggcagaccactgccgccgcatactggtgcgaggtaaggggacagcccgcggccctgctccactggaccctcaccctacccatactggggcccccgacctagctgcagctgacacctctcaattcatatattcattcattcgtcatccagtcattcattcagcaaatattattttgagcgtctattgtgtgctggacattaagctgagtgcaagggacaaagcagcgaatgggaccgaagcggtccccgtttctccgcctctcgggccagtcccctagttctaggcccattcggaacggctactgtggcgggggcagaaatggagtgcgggatgctgagagcctggactccgtcccgtgaccctcaaggcaagtgcggagaaaagcgtcttgcgcgctccgcggggacaggacgtggagggagcagcgtcggcaaccgcgggaggaaaaggccccggctctgcagggcggccggggtgcttcctcgcctcctgcctagccgcgtttcccgtccccggcaatcgggacccgcacggattgcccaggggagacggcgcgggacgcggagggtggcgtgcgcggcgctagcccgctgtgcttcactctctcggttcccacttcctcgcggcgcctgggcccagccggctctcggcgccgccttcccgcggcctggcctttcacgtccttctctttctccctcggccctcgtcctcctctcgtctttcccggccattcctctcagccgaacgcgccttcccagcaccttcttcctgcaagctcctccatctggactgcgaccgattacccagctcttcccggcctcctctccgcgaggccgaggctccccaggtccccagcgccagcctttcgcaatgccaagggctccgctttccctcgatctgggcctcgcccggcgagatgagaggagaaaggggactccggggtcttgccctcagcccgaccccaggccgcggccagagcctgaagtccgctgcctcctccatccctaagccctgggaccgggagacccagcgccagaagaggccactggcggtaatggctcccccaggctccttcctgggctccctcctcccggcttcctcctgctgcctctttccagcctcttcacacgcgccgctcgggagagccactgggcctctggaggctaccggcccgagcggatttctttggcctccgcctggggaaggcgaacaggctggaagctggccctgggtcgttccagcgaggggattatgtttgatctgagctcggctaccctcaagctgactgggacaccctgggccagttgggcactacctctctgcggctgctgggtgtgggtggcactggggactggagggtagagcatgcatgcagcccagtgtgagggtgactgatgactgccttgaatacagagacaggggccttagctctgggaaacattcctggtgccagatgtcactgggacagtaggtgctcactgctactcatagttgactgcttgagtcaaggcagttataccatcaggaattccagcaggtgtgtggacctgttgggcaccagggattaaatccgattttattctttagactgtgggatgtcttgagtgaaggcataagcagaccttttggttccattaaaaatatctgtaggactgccagagaaatcagtcctccaatcccacacattcccaggggaggatctaaagtcactgcctgtgacactcatcaccttgaaccccacctatgggtggacattttcttccccccaggacaattgtgagttctgtgcccacctaacatcctctccactctactaaccctgtatgtagagcaaataagttttgtgtacagatgtcaattaaatagccttcaggggtaaactcataggaagtggaattcaaaagtgaccctccaccctgtgaggtggggccacccaagctgggagcaatccacagccaggcagagatgggcttgcactggatgtgagacagcctgtgtgcgtcttcagggggtgtacttttataaatgtatgtgcacacacagaggtgccaatgcatttgtaaaatataatcgaaatattagacataaagcatagaggatatatttacacacttgacagaaatgaaaggcaaatggggcttttataaatccctctgcccttccccatttaatgatagggaggttattatgggcctgaaacgctcaggatgtgatttgccactaatctctcctagccagggtcacctgtgttactggcagtcccaccatggctcagggctctgatcaatgaaacaggcctggcactggtgaaggaaagtctgaactaactgccttggcccctgaatgaacattccttccataggccttcaatacactttgcccttgacctcagagaacacatcctcccaaagagcctttggaaggaaaccactaaaaggtaaaagggaggcatttgcccttgctgtcctatgtcaatgttgggttggggcctccccaggacctgtcctttcttggggaggcctcaccccttctgggtcctttctgcctccctttcattctgcactcctccacctaagggcataccacaggggggtggggggcaggtttgttgagggagtcctttggcacagggagtaggaggagagcttgggcaccagagttaagcaaaattggtttagattactgaccttatagccctttaaacctgaaccagtttctttgtttctctttgcttgtttccttatcttacaaagggacccatagcccttatcttaaaggacttgccaagaatcagaggtgatgtctataaaattgcaaacacccagtaggatcttcataaatatttgttgacagaaggaagggtgtagctctgaggtgacccacgaaccacttttgatgggtggggcagtggaccttcgttgtctgaggcctctcccaagtcacccctttccccctccttctggctctgggcccggggcctgggctgtactggaggtgagcacctaggggttaagaagccactaatggtaaaggaaaattagcaccatcttgcagaccacacagtgcagccctccccaatctccttggtgggaccctttttgggccagtgactcaagcctctgcgaatacagggtggagagccaaagaggccaaacgtggtgcgtctcctgcctcaaaatgaagactcctacatgtcacacatgggcacggaccagagctgctgagatgataggccgggcgcataacaggcaccccgcacatcgcaccgcggacgcagcgatcctcccatttgtaccctaaggcctgagaaggccgctccacacctccgcgtgcacagtccctagaccagtgagggcggggacggggaaatccttttgttttatattggaaaccttacgccaaaggcaggcaggaagcaaccaaaggaacaacaggccgcctgagccgtggctcaaacagcacagggcagtggccgagcaccaggcttttcggtggagctgggataccagcaggcagaagaggtggacaactctgaccgcagactccctacaaccccgcgatcgatgctccacctgcacgctcaaacgcacctgtttcccaaattaatccagacgcgaatttaacgaccgattttgatagatccgggaaattctgtccaccagcgtcacccaacacagcaacttttacagacaatgcgtggcgtccgttcctgctcacccaaagcggcctctctgggctgacagccacccctgcgggtcctcaaaccccactcgaaaccctccgaacccctgtgtctgggagcagtagggtgggatgactgcaggatcccttgaagaagtgactcgctgcaaccccaccaccagcagcaaaaacgctttcacccgggagctgcatggatgcgcggatggctgggggctgaggggacgcgtgaagcccaggcctcttgcttgggctgggcgattcccgccgtgggacgggtgggattgaccttagtggagtccagtccttcggagaatccgcgggcagtcgggacccacgctccggaaacacccaagtccgaactcgtacacacagcacaatggcgtgcagccgccggggccctaactcccagagacgcgtctgaagaagccatacaagggggcgcagcttcggggctctggctgggaggttactgcagggacagacgcctcgcctccagcagccgggtccaggctcagggccggccggcctctgctcgctttctgcttggattaccaacagccactgggcttggggagatcggccgggccgcaggcctagccctgctgagcaggcgtttagtaaggaccacaggactttagtctcaatatctgagtctgttaatagacctgacaaccgaggaccagcccccaaggcagacgtggaaaggtgtaaatggttcatgcaaggaattgcactttgagatttttgtatttgttttattttttggttttagcatttgtagagggtttcttttttgtttgtttgttttcttggagttgctttacgttattttttccttttacttgttttcggcaggaggcccacattcccatagcgtgcctattcctatgccgggccctctcatttgggtcttcttttgtttcccccccttccataacccttacccccacaaacacacactgaagcagaccagcaacccgaaaaatcatcttgtaggtgtgtcttgtgtgcccagttttcattttcagggaacggttcaggaagattagacagctccttccctcctcaggcgatttctgttccccgcctggtctggtagacccaggaacccatggaactgccaccgcatccccttgccccacacacctgcatcttcagggatggtcccccaggtagcttctggggagtccgaggggcaaggaggccaaatcctttggaagcccggacaaggagtgggtacctggggctacaggaaagggaggagatggcagtggcatgcacccgcagtcagtcaaagccaccgggctcaagtcttcctcttttgcgcagcaccggtaaggagagagggtgtctatgcatcacgttggcctgggtgccatttccccaattaccccttggctgcaggctcccttcttgttggctacatttctttgatttctattttaatggtgggaggtggagcatatgaattttgcctatttgctccttgcttaatataaaatcacaaataatgctagacctgactacccttggagagccagtagccggttacctggctgtgcatctgcagattctgtaccccagttcaagatactctgatagaagacaccaacgctgcatgggcctgcccaccaatccctgcggcgagacaggtctaggaggctagttcattcctcatacccccaacccagctcatccgggaaggcagttgggggtttcagtgtcctgggttctcccactgttggtggatgctgactggggacattcagcactgcagaaagaggtagcagccccaggcttggatgtggcctacagagccagggtgaatgcacccggaaagtcagggtgagtgccagactgaaggagtgtgctataaggccctggcggaggcttgggcttgtaaaggctcagggccctccttgaaccatctcccccgtggccttaacatcttttattctttctttttttttcttttcttttccttttttttttttttttttttttttttagatagagtggttgctctgttgcccagactagagtgcaagggtgcaatcatagttcactgtaaccttgaacctctgggctcaagcgatcctccctcatcgacctcccaaagtgctggattacaggactgagctaccgcgcgtttcttgttctttaacttattctacaaacattaatgcgtactcactgtgtgccagactgatcctggctcaagctgctggcacgcagcttcccataaatgtaagctgtttctgcccagctcccacagtcaggccagaaacagctgggtagagacttccccgctgaagtcgagggggcgggctccccgagcctgcttcccttgaagccaggcaaagaccacgtaggaggtggtcactgtgcccaccaaatccaggcgatcttcccggatgcttttagtgcactgtaggcactcaataaatacttctcgaataacttaaatgggacaaaattcatcaacatggcataattctgtaggtattaattaggcggccaacgccttctcccggaagaacgtgtgttctaatattatcttattttttgacgttgcaatgtccttcttatatgaaacagtgatcatggcagaacatagaataattgttaaagcatgaagttgacaaccccatagtttcgaaattttgtttctgcaatccgcagctttgggaagcactgaattacaaaacctgaaaaccctcatatatgtggcggcttagaggccggcctaggctggagcggaggtcttgggaagcgctgggccgctcgtaaagtcaatggtgagtctcccggctttcggctttcggctttcggcggcagccgggtgtgaggttccacgggcaaagccagccagagggttgacagaaataactggataaatctgtgcccctgcccctgccggctcacacggctgcagcccacggctggagccaaaaataaccgcgcagttgacgccacggtttctttagcgtcttgctggagacattgactttcagagcccctgtcccgccttccattccccactacttggcagcccaccgcgtccacccgcggagctgcggaagccagggccgggcaaaggacactctacgaggcacagcctccggcagggccacacttacaatgtagacaggaaaatagaggatttaaattcaaaaagtaatacgagctcgatttttttaaaaaccggaagcaaagaaggatcccaggaacagccactgttttcaattctgggcgagtccttccaggcgatttttccacgctcttatagacgaacaaataaataaaagcagaactatatttcataggctgttttgcaatttaccatttcaaaaaaatttaatctgcagtgatcatcttctctgctgaaccagttcttgctgtcccttgactgtagaattaagtattcctttagttggggaaagcctaattcccctaaagactggagggaccttggggttgtttttccttaatataaacactgtgaagtaagctccgaaggcagggttcttctagacctttgactgtttctgtgggataagtttctagcagtgtaattactgcttcgaaagatttacacacacaatttaaatatatttcatttactgtaataggtaattgtaaaatagataattaattcatcaaaacatctttttttcagacatcaggagatgggaggtctcactattttgggtttaagctggactcaagtgctcacatagctgggattacaggtgggagccactgcactttttaaaaagtatccggtgaaaaacctctcccatccctgtccccatcacccacttcccacctggttcaaggactttctaatatgtccttccagataatgtttatgcctatggaaatcagtgcagttatataacttttttcttccaatatatcttggggtgtaaataactttttgtttgttttttttatagatgcataatattccatttaagtggactaggtggatcataatgtatatcatataaccagtaccctatttgtggacatttggttattttcttatctgttgctattatatgtaatcctgaaataaataaacttgtttcttagtcatttccacatgtgtgagtatatctgtcagagaagttcctaaaagtgaattactgggtcaaatggtatctgtgtttgaaatttgcaagataatgcccaattgtttgtcctccataagatggaagcagtttacactgccaccagcgatgtctgaaagtggttgtttctccaaaatttgccagcacagttcacattttacatcctgatgaacatagtcaagttattctgcaggagaagtttagttacttatgtccacccctttgccctgtccccacactggacattttgtatcatttcatctttgtcgatcttcatattcattagccagttgtatttcttctatctattgattcatttcctttgaccagtttaatttgcaaatataccttttccttattgatctgtagaaactctatgtattgctttcaatatgtgttgcaacattttaatttacaatttatcctttgattttgtttaggatggtcttttgttttcagaagtataaaatgtctttttatttttattatgtcattatatttattttttagagacaagggctcactctgtcacccaggctggagtgcagtggcccaacaatagcacactataaccttgaactcctggcctcaagcagtccccccacctcagcctctggagtaactgagactataggcactccccacaatgctggcctagctttaattttttatttattttctttaattttttatttttaattttttttagtagggacagggtttcaccatattgaggaggccagtctcaaactcttggcctcaagcaatcctcccacctgcgcctctcataaaatatctttttaattacaaaagcaatccatactattttgctatgtcatgtaaaatttaaaagtttctaatttcccttacatgatacacttccactcctaagatttaccttccaaactttacctagtaattgaaaaatataaatatgtaagttatatattacaaaaattggatttttttgcaatgacttttttcttaattaaacaaattgtcttagcttgcaagtagagtaaaagaatatttgtggaaatctttctttctagaactccctcattctttttaaccactgtataggattccgttatgtagatatcatataacttatttaactagtcctctattaatggatatttaggttggttgtactttttcattattacaaacaatgctgtagtgaacatctttgtatcctaatttgaacaaatggtttgttttatttttaattattcttatctttttatcccaggcaacacctacctcatttataccatagaatgagtgctcccttgaacaaatggttttttttaaatcttatttatgagacaatttggaacatgtaaaaccaggtgggatattttattatattaaggaataattgtcgatttttattgtgataatagtattataggtgacttttttaagagtcccccctttttaagagatacatgttgaaatactcataagtgaaatgttatgacttctagaatttgctaataattacagcagaatagaagaaagaagattattcctgagtttctaatagttgaaattgggggataggtatatcggagctcattgtactgctctccctaattttgtaaatatttgaaatttgtcataataaactgtttaaagtaacaagaatcattttacatatacatggtatgaatataattacaggataaattcctagaagcaaacttttaaaatccaaggatatacatttaaagttatgatagtatttccaaattttataccaaaactcttatattgatttatactcttagccatcttgtataaaagtgtcatttctctacgtcctcccaactcagaatatacttaattttttagagtgaaatcttttcaagtgacagaataatctcattttattagtagtttaaattgctagtgaggttaagcatgtttttatgtagttattcttcattttaatattctcttctgtgaatttttcatatatttagccatttctctatcggatcactaattgttttctcatcttcgtaagtgccacttatatagtaaggaaatgagccctttttctgtgacatgtattgcaaacaactcccaggtcactttcttaaaaaaaaaaacaaaacaaaacaaaaaacccacaaaaaaacagcaacaaaaaactttctttgtgggattttttttttttctaaactgaaatttaaactctaaccacatttaatggttgttcctttttgggcttctagattctagctcctagttagaaaaatcttcatccagcatttaaaacattatatatgcatacacaaacatattaaaatgtttgctaccaaaaaaattttattccctagtcttttcaccaaaagaaataataaagaaagacaaaaaatgagttgaatctttcctccctgatcggtttccactcctcagaggcaagagaagagtgaggtgcttcttttgccagacttgttcctatgtggttacaaaaacacaaacacacacacagaaagagtttacttttactgtttttttaatataaaaatgggtttatgcacacttgccatttcacttagtagtatacaataaacatccatccaggttatgtgtctcattcttgttaatgtttacatatagccaaagttattactagactgtgattttatcgacaattttcctattgataaacattcagcttttcccccttttctccctcttgcaaactatgctacaaacagtgggtctgtatttatcaactacgccaacgtttctgtgtgatagaaagctctataaaaatgctgggacaaaggaacagtgcattttaagtttagctaggcattattcctcttcaaaaaccatatattatatcaatttatgttcttattgagagagcttgagagaacctaattctactcagccttgccagtacaattttccaaatctgatagataaaatatggcatctcaaaaaacaaggatatctcattgctgttataactttcatttttctgattcctctagcccgagtattttttcatatttattaaccacatgcatttcttcttctctgaataatttgttcggtttcccactggactgcttgactttactcactggtttacagaggctgtgtgtataccagacattaggactctgttaagaattcattatgaatattttctccccatctgtctcttaccctgcagatgcgtttatttttaggtactcaaatatgtcatttattttcctttctagaaagttattttatatttgttcttcaatttttagagcttttatttacatttaaatttgtgtttatttttgcacacagtgtgagataaatagctttattccaaataatgaactaattgttcaaaagctatgtctctaataaccctgtctttcctccaactaattcaaaatactgtcttcccaacataccagatccacatagacacatgaatttgcttcataactcttgtgcagcattataccattttagttgctgtagatttgtaacatatttgctgtgtggtaatgcaagtattcactactattgtttaactttttttgttgactatccttgcattttcaatgttcccaataaacttgagaatgaattttccataaggaatttttatagcaatcacattatatttgtaggtgggggcaggaagggccttgcacacttaaaagtcagcatattatcggccaggcatggtggctcatgcctgtaatcccagcactttgggaggccagagggggcagatcacttgaggtcaggagcttgaaaccagcctgggcaacatggcgaaaccccgtccctactaaaaatacaaaaattagccaggcgcggtggtgggcgcctgtaatcccatctactcaggaggctgagggaggagaatcgcttgaacccgggaggcggaggttgcagtgagctgagatcacgccgttgcactccagcctgggtgacagagtgagactccgtttcaaaaaaaagtcagcacattatcagcttatcgtgcaaagagactacctagtgctaggtaggaaaagaagtgagatagggctttggaggtgggggggatgtctattgggagaggtgccagaggggcaccagaggtcagaagcataagctaactactatcaggccgggggtcaccacctctcccaagcaaaggctcttgggcagaattcaccctcccacataccctcagagctcactgctctttgaggagacttgaggggtagcaaaatgcaggactcatttcatttcaccctaataagtgcctacctgcaaggaagccctggaatgaaagctgttcctctttccagatgctcctcccaaactcctcctagaaaaggagcaactcaaaaaaagaggactattttagtaagataggctatattttgctgcagagacaaccgcaaattttagaggcttaacaaaacacaaatgcatttatcactcacagaagtccatcacaagtggacaggggctcatcctgatactcagaaacccaggctggtaaagcttcttcactcctgcttccaagaccatcacagtagaaagggtgtggcaacacacacacactctctggttattgggttttgttatttagggcagggatggtaatatccccttatcttattttattgccttcccaacactcgtctttgccttacatatttttaaaatttattttttattagaaataaattgcttgaaggccgggtgcagtggcttacgcctgtaatcccagcactttgggaggctgaggcggggggatcacttgagccttttgagaccagtctggccaacatggtgaaaccctgcctctactaaaaatacaaaaattagcgggcatggtggtgggtgcctgtaatctcaactactcaggaggcggatgcaggagaatcgttcgaacccaggaggcagaggttgccgtgagccaagatcacgccactgcactctagcctgggtgacagagcgagactccgactcaaaataaataaataaataaataaataaataaataaataaataaataactttacatttattatctgtctccctccccagtacaaggtttacaggaacaaatgcttttctcttttgctcatttctgtatccccaggccctagaataatatttgacaaataagggcttattaaatacatgttgaatggttgaatatattcagttgttttaatctacataaatgagattaaactacatgttattctgtaacttactttcatacactaatgtctgttcacatagcttattgcctcattcttttcaattattacatggtattttataatacaaatgtaccactatttgttcagccatttctcttgtggaaaatactgaggatgctttcaaatttttggtgttttgagcagtgcagcaacacacaccattgttgtatatactttggagcacctgagcctgtgtttctctaggacaaataccaacgaaaataaaatcaggccaggtgcggtggctcatatctgtaatcccagcattttgggaggccaaggtgggtggatcacttgaggtcaagagtttgagaccagcctggccaacatggtgaaaccctgtctctactaaaaaattacaaaaattagggggcgtggtgatgggcacctgtaatcccagctacttgggaggctgaggcaggagaatcacttgaacccgggaggcggaggctgcagtgagcattgatattgcaccactgcactccagcctgagcaacagagtgagactctatctcaaaaaataaaataaaataattggagcaaaagttatgtgcatctttaatcttgataaatgcagccttaaaagatggactcaattatggttctattaatagcgtataggagtgtagatttccctacagtgcaccattgttattaattgtcatcattgtttttaatcacttgttaatgtcctttcaaccttatgggatataaagggctttccattgttgctggaacttgtattatattgattactataaagctatgcttatcctttcatatgtttattggccatttagctgtctttttttgtgaatgacccagataaattacttgaccatttattttatcaggctatttacttaaatttttttttttttttttgagacagagtctcacggtattgccaggctggagtgcaacggtgcgatcttggctcactgcaacctctccctcccaggttcaagtgattctcatgcctcggcccctgagtagctgggattagaggcgcacgccaccacacccagctaatttttttatttttagtaaagaagaggtttcaccatgttgcccaggctggtctccaatgcctggcctcaagtgatctgcccacctcggcctcccaaagtgctgggattacaggcatgagttaccacaaccagcctctttgactcttaaatgtattttttttttcaaatctgtttcttgtactttaccttgattttggtgcttttgtcatccaagtttttagctttaatatagtcaaatacatcctttgtgtttcctttacagcctccagtttttttgctgtttgttttttgttttttttgagaccgagtcttgctctgtctcccaggctggagagcaatggcacaatctcagctcactgcaacttccccttccctgcctcagcctcccaagtagctggattacaggtgcctgccaccgcatccagctaatttttgtattttttagtagagacggagtttcgccacgttggccaggctggtctcgaactcctgacctcaggtgatccacctgcctcagcctcccaaagtgctgggattacaggcgtgagccaccacgcctagcctacagcctccagttttgcagcttgcttagaaatttcatcccaagcctagcattctaaaaacatcctcctatatttttttgtaatgcccttataattttatcatctatgatttggtctttaatccagttgaaatgtgttgttatttatggagcgagataggaatttaacttaattttattccaaacatacaatttatggtcaccaatctgcttaacgtgacttattgactaaatcactcttttcccatcttgaatgcccttttatgataaactctatgactatggatacatgtgtctaatatccccttatcttgtacttcccatgctattgtttccccacatgcagtcatttgagtcccatcttcatttgttatattaatattccatttattttcttaatattttagcataatgcattttaagattaaatttccactttagcctcaccctaagcctataaaattataggtttaaatttttttctagtaaacattaaaataaatgcctaactttttaaatgacatgcttatttatgtacaattttaaatcatcttacaaaccataagtggaatacagagacactatcgtgttttttctactaatggatttgtcaatttctgtgacaacacatcactctagctttgtggcatgcttttgttgtcaactttttattttgaaataattatagactcgcaaggagttataaaaatagtacagagaagtcccatgtatccatcacctagcttctctgtagatggcattttacaaacctatagtaccttatcaaaaccagaaaattgacattaatacaatataattaactagactacagaccttcctcagatttcacctgtttttccttgcactgtttttttgttttttgtatatagttctatgacattttattacatatatagatccatgtcaccaccaccacagccatgatacagtactgtggtgtcaccacaaaggaacttcctcttactactcattgatggccaggtccttcctccatccccaaatcctggcaaccactgatctggtctccacctctataattttgttacctttatattaaataaatggaatcatatagtgtataacttttgggaactgttttttcccctcagtataatttcctgtgtaaattgttgtgtgtttcaatcgttcttcctttttttcctgagtagtatcccagagtacagttacaccacagtttgtttaaccattcacccattgaaggacatctgatttatttccattagggggctattacaaataaagctgctatgatcatttgtatacaggtttttgtgtgaacataggatttcagctgggctgaaatgggattacagctcacgcctgtaatcccaacactttgggaggcccaggcaggtggatcacctgaggtcaggagttcgagaccagcctggccaacatggtaaaaccccatctctactaaaaatacaataattagctggttgtggtggcaggcgcctgtaatcccagctacttaggaggctgaggcaggaaaatcgcttgaaaccagaagacggaggttgcagtgagccgagatcgcgccactgcactccagcctgggcaacaagagtgaaactctgtctcaaaaaaaaaaaaaaaaaaaaatcagccgcgcatggtggcaggtgcctgtaaccccagctactcaggaggctgagacatgagaatcgtttgaacctgggaggtggaggttgcagtgagctaagattgcaccactgcactccagcctgggggatagagcgagactctatctccaaataaataaataaataaataaaacaaaaacaaatatttcatttccctagaataaatgcccatttattctgggcatttattctgggttgtagggtaagtatatttttaactctttaagaaactgcctggctagtagtaccattttccattcctaccagcaatgtaagagagatccagcttccctgcatcctcaccagcttttccactctcagtattttttctttttgctgttctgataggtgtttcttattgcagctttaatttgcctttccctgatggccagcaatgttgaacatttttcatgtgcttatttgtatggcatgttttaatatttggtggcaagtctgaggttgcctttctcgtctgggtcatgcctccatgaccctgagggagacagctgcacttggctgctccctgaggtggcaatcccccttttaggtcttgtataaagagggaaggatggtttgatctcatgtttagggactcaggctcagatgctacagggtgggcttgaggaggcttattaaggggagggtaagacaccagctgtaacagcacccttcctcctattcataccccacaaaacatgtttgataaaatcagtgcctttgagatggattcacttgggagttttgccacaaagttctgagtctgctctcacaattggaaattatggaacctgagcaaaggagactgatccagtcacagtggggtcacacatattatcctatctttttgaaatgtgaacagaattggagttggggagcttgagttgtcctaagaggcctgtagtctctagaacacatccttttgataggctctgcccagcagcttggcaggacctggcctgggatggggagggaggccacctctgagcagtgacacatcctccaccctggctcaccttttccctgaggctgactatgaacaggacggtgcttgagaacctgtgagatctgagccaggactcttgagccaggagccagagcataccctggaaggggagtgtcaatttgcactggcaggacccagaaagagtcagtctcctggggtgggacgcttggagggaggggctcagggtaaccctctagagcagggattctcaaggtaggtcccaccgtccctgtggatcacaaggagcctcctgccagacagcacatcccgaatacagctctttccattatgttctctaggggaatgatgaacccatccagaagattccatcttttactcatgaccaggtcctcttcatttcaacctattaattgaattattaagaattatcaaccgagggctgggcacagtggctcacgcctgtaatcccagcactttgggtgtccgaggtgggcagatcacgaggtcaggagattgagactatcctggctaacatggtgaaaccccgtctttactaaaaatacaaaaaattagccaggtgtggtggtgggcgcctgtagtcccagcttcttgggaggctgaggcaggagaatggtgtgaaccctggaggcagagctgaaattgcgccacagcactccagccgtctcaaaaaaaaaaaaaaaaaaagaattaccaactgagggtagacataaagtaaaatgatggaggcgggcgcagtggttcatgcctgtaatcccagcactttgggaggtcgaggtgagcagatcatgaagtcaggagttcaaggtcagcctggccaacatagtgaaaccctgtctctaccaaaaatacaaaaattagccaggcatggtggcgcacgcctgtagtcccagttactcgggaggctgaggcaggagaatcacttgaacctgggaggctgaggcaggagaatcacttgaacctgggaggcggaggttgtggtgagccgagatggtgccactgcacttcagcctaagcaacagagtgtgtctccacaaaaaaaaaaaaaaaagaataaaaaaaaaagacggtgtttcaagagtttcttggacactgccagtaggaccttgaataaattacttaaattttgttactccatttcctcatctgtaaaatggggatcatatagttccaaattcatggagacattgagaaggttaaagtgcttaaaacagcagggtgtggtggctcacacctataatcccagcactttgggaggctgagacaagaggatcacttgagcccaggagttcaaaaccagcctaagtgagaccccatctcattttttaaaaacaaagaaaaaaataattaaaaaataaaataagtccaggcacaatggctcacacctgtaatcccagcactttgggaggctgaggcgggcagatcacttgaacccagaagttacagactagcctgggcaacacggtgaaatcccctatgccccccgtctctacaaaaaatacaaaaattagcagggcgtggtggtgtgctcctgtagtcccagcaacttgggaggctgaagtcggaggattgattgaaccctagaggtcgagactgcagtaagctgagatgcgcctctgcattacagcctgggcgtgagagtgagaccctgtctcaaaaaataaataaacaaaacaaaattaaatttaattaagtgcttagaacagtgactggcccagagcaagtactgcagacgtttgtcagcctttgttacggctggaatgtcaacagccactgcccattctggccgcgttgcaaactccgactgcgtgcgccccctggagggtattggaattcctgcacctgtggagggttgcttgctttcttgggcttcctcaaggcggccttgtgttggtaagcttcccattgccaatgctaagtaatggaaattcctgttagtttagcttcgttatcatggacatcatttgtagggagtgattttgtaaatcctacaggatgtgatgctgcatatttccacaatctaatttgtaatataaaatgttctaataactagatttcaagccatcagtatatgtgggtcacacatggatcatctccacccctgtagttaaatgttactaagttctttatcaggaatgtgtggggaacgtgggctccaaatcactcttcagtgggctccaaaatattggaggccctctgtgcggagggcattggtcagagcccaggagtggccctgctgttcaggactaggcacatggggagtggcagcagcccccctctggaaggcatccagcagcctgatatggtagcagttgtccttgggctcctcctagggacctcagctccccagactgtcctctaccgctcatcagctagcctcctcctcatggaccccaggtcccaggtctgtggatgcatgacactccttcatgcatgcatgcatgcacagacacacacacacacacacacacacgcacagcttaggacctggctctgacctctccagtaagccttacctgattgatcacattcaattctaacccatcatcccctatgtacttgaggacccagcatatttttcccatctgttccttactctgcaaaggcccagaatcctggctgggacagagtgagtcctttcttcccagaccacattggtagacctggcagttgtactgaggcctattcacatacatttagccacccattagatataataccctgcattgggtggttaaggaatctgggcccagagagggtgagcaacttgtcacaggtcatgcaaccagatccaggcctgaggagctctgcgatagatcacaccaccttttattaagatgctttctggtgatctaactccctagctaatgaactaagctggctcctttcatggcctctgcagatgccaaagggacaattcgggaaattgtcctgcctaagggcctggacctggaccggcccaagcggacacgtacatccttcactgccgagcagctgtaccgcctggagatggagttccagcgctgccagtatgtggtgggccgcgagcgcactgagctggcccgccagctgaacctctccgagacccaggtaagagaccagggccaggccactccactcttgtcctggcagcctgggaactcctggggatatgaggccctgtgagctgctacagggagacccaactttggaggagttcagacaagcatgagggaaagactttaagctacaggtaaaccagagtgaaagagcaaataaatatagcgccgaccacagacagtcaggaaatgccaatgggggccttctggatagatcaggcacttttggatggaatatggaaaaggttcagagaaactggggaagagcagccctcagggcacagggagtggcttgggggggtgttggcatgtaagaggagtgacaagaagggatggtgagggcttggctggttggaaataacgattctggggaagatgaaacattataaaattgggctggggacctctcgcttctccatttctggccctttcccaccctccatcaccttcccttcatctcagggtgcctcagtctcttgttggaaaggaggggtctgcacacccccttcacctgggtaggactggcattttaacagcagtgtgcttaactcaaaagaaaaaaacttttgtaaattaagcacctaccctgtatgaatggagacccttcaagctggtactagagctataaaatactaccactactactactactactaatacttagtacttacatgtgtcaggcactaagtgctttgcctatgttaagtaactaatccctcccaagaagcagatgatgtcattcccatgttacacgtgaaaggaagttatgcccaaggtcagacaactaattagttccggagctgggctttggacaagcagtctctcatctttatgctgcctataaactgggcaaccttccttgagattgtcaaagaataactcagagacccttctttcagccagagctctagtagtttgctctcatatatgagggagatcaatcaatacatgcattgtaaacgacggccaaaacaggattgataaagtggagaggaagggaggaggggaatgcggaagcactggtctggagcagtgtgctggtttccttccttggagcgaggcgggaggctgtgctggagtgagggcttcccgtctgtgctgtgtggctgctgtcctcccctgtgtccctgcctcagtgaggtcagctctccctgtttccctcagcataattcctccagcccctcaaatccccccaacagagtgctgtgcagcccacccctggggagggggtagtcagatgcgcctggaagtcctcctggtccccttgagaggttagcaggttcctcctggggtacactgagagtagggcagaggaagaggtgagaaggggtgagaggcagaggaggggcaggccgggaggaggggcaggccgggaggaggggaaggccggggaaggacagcagctgctgtcctgcagggccgggtcatctccacctgcacttgtttttccccagctgccactgcagagctcccaaacaaccctgcggggcctccctccagctgggctcaacagggggctgggaagccaggcttgtgctcagagaggaggctgcagtggcagggccaggccagaactcctggggaagtcactgaggcccgtattccctacactgagctgcccttggaggtcaagcccaagcccccctcttccaggaagccttctgcaggcaccttgccctcttcccaagagacccttccacatggcgtgacctggagagacagatagtgtgtgtgtgtgtgtgcacgtgtgtgcatgtgtacatgtgtgtggtgttggatgtccaccagtatttgcttccctaggacaagaatgtatttataggccatggctcctcgtcgtgcttcacaaggagcccagaacacagctggacacatagtaggccctcagcaagtcctccgcactgttctcactacaaccctccttcctctgtccccagtcctagggttgacagatagtaaaagtaatggacagctgatgcttattgagcgcttcccatgcaccaggtcctgttccaagggtgtgacatagtctaactagtttagtcctcaccacaaccttatgggatacgtgtgagatttttcttccaacaccaggtgtatggtatgttccaaccaccagcaggcagtgctccaattctccagcatcactgagtatattcaacagttcaatactgacactaattcccagagctagcacagaccctacaagttaagggctctgtcccacaagacagtgccacagcagactcaagttccaggagccacctgtgcttctgaatggactggcctaaaaccgggggctcccacatcgccctctgcaggtttgacaattcactagaatgacgcacacaactcaggaaacacctcccctacacttgctggtttattataaatgacacgagtgaggaagagccagatggaagagacacaaagggcaaggtaagggggaggtgcgtggagctcccatgccgtttccagtgcccccattcccagcacttccacgtgttcgccaaccagaagttctcctggtctccttgttcaagactaaatccaggccggcctggcacagtggctcacgcctgcaatcccagcactttgggaggccaaggagggaggattgctcaggagtccaggagttcaagaccagccttggcagcagagggagaccttatctctaaaaaaagttttttaaaacattttttacagtttacactgtaaactgcagggtgtggtggcacacacctgtagtcccagctacttgggaggctgaggtgggaggattgtttgagcccaggaggtcaaggctacagtgagccatgttagcttcactgcactccagcctggatgacagagcaagactctatctcaaaaacaaacaaaaaaagactataatccaatctccattcccctcccctccctagaaggaaagaatgggggcggctgaaagtttctaccctctaatcacaagtatggtctttctagaaccagccccagtcctgaaactacctagagatccaccctgaatcacctcattagcatacaacagtaagtcttatttatttatttatttatttatgtttactgtagagacggggtctcgctttgtttcctaggctggcctggaactcctggtctcaagtaatcctccctcctcggccttccaaagtgctgggattataggtgtgagccaccatgcccagccaataagagtatattgtttccactttaaatagaaggaaactgaggcatagaaaagttaaatagataacttgctcaagacttgcagcgggtgcattcatgggtaatagtacccatgaagatggctttatgggtactattatccccatttaagcaaactgagcctcagagaggttaactaacttgtagctagaattctgtggcattctcagtatgttcacccataattttgttcaaaaatattattgaatacctactatatagcaggtactcttctaggcacttgggctttggcttagaacaaaacagaccaggcatctgccctcgtgcagctaagatccacagagacaaagacaaaccgcatttccaggagtgatgagtgttgtgagggagctcaaatggggtcataggagagagactaaaaggaagtgttttactggggtgttcagggaaggcctctttgagaagatgacgttgagcttaggcctgagtggcaagggagaaacagccagatgaggagccagaaggagacgtcaaggcagacggtaactatgaagacgtgaggggcaggaattggcatagaatgttctagaagtatcagaaggccagagtggctggagctacagggtaattgggtaagtaggtaggggaggatcatgcgatgcttagagactatggtaatacattgaagagaaagtgacaggagatgattggcattttacagaggttctctggctgccacttggggaagggacccacaggggaaaggagtggacaggtgtggacaggtaggaactactgacatgggtcctgaacagagcagtggtggaggagagaagcgtactaatgtgagaggcactctaatttagtgctggaacatattaggacttgctcatggattatacgcccagggcaagggaaaggaagtggtttgggtagaacaactgggagaatggtgacaccatataatgagttgagaaactgggggagaagcaagatggtgggagcataatcaagaattttgttttggatcagttaagtttgagatcccagcggagatgtcaagaaagcatgtcagattttggggggagggctggtttttctctggtttaagttatctgagagtctctgtcagagctcttttgggggaaaagataagaaattccttcaagtgccctcagataatggatggactccccagggattaaaaacagaagccatagccttgttgaaattcaataacaggaaccatggtgtagccaggaattggaagagactggaagccaaaggctcttttgggcccgagggattcagcaccagctactcacagaacttcctcccagtgctctgctgagtatgtgctccaactgctctccaaaatatctgcttctctctctgtttcttcctctcctctcctctctttttatctcttctcctctcttttttctcttctcttccttctgccaaatagcatctctaccttcttccctggatactcagaggacccaggcatggtcccaattcaggcagagaaaacacagagcttgctcagggcccatttccatggctagtctcttctttaatctagcatgcccaattcagctcagttgtctgcagatttaaatctgaaacccacttacaggattgggcaggcagaatggcgaagccctttccttggctctccaccactcacagggctctacaggacaaagggtccaccagagtaggaacagtgaacaagacacagtgcagctgacctctgtcccggccttgcccagactccatggctgtgcaacagaggctaagcatggctgccctggagagcaggggcagcctcagaggaatctctctctcaagactatcaaaagaaccctctgcccacctttgtcagcccaagggtagcatacactgaaagttcttctcatgtcagagaacatggacagccccacttagtccagttctccttggttttagaaaccttctgatacaccttgtcaccatgctttgtttgaaaaagaaagtttggtgtttgattaaagcagcatttctcaaggtatgctctggagaccagctgtacgtacagctcccctggggtaaaatacagatgcctgtgccaccctcagcccagaggttcccagtcagatttctagggaagaccccacaacctatatattttttgttccaggtgatttaatgcacagtgatgtctgagaatcactggcttatggaaaagtgagcaaatctgaccagatgatgtgatcaccatgttgcttaaaagacttcatcaactgccagcactttaataagtctgtgattattagcccaccgagtcatcacaacaaaactatgaggaagagttaagaaccccattttactggtggggaaactgaggctccaagaagttaagtaacttgacttaagtcatctagctagttaagggaaccagaattgaatcagtggctgtctgacctctgattctccacgatagtttgctactatatattgtctcctccactatattgtttgctacttcaaccaaaacacttaccgtgttgtaacacttactgcttgcccatgacccaccctgctagtgtctgacagccaagagggtcaaaatggagttttatttatttttgttttttcagcacctggcaatgcctggcttgcatcaaatgcttgatatttctgtgttgcctgaatgaatgaccagagtaccagggtccaagtaggacataagaggatgtggctgcagaggaaaggaagatgagaagctggctcaggactcccctcctgcagctgggctggaggacgttctcagggccaggagcccaggagccaggtggagaacaaactgccaagtcccaatatccccccgggatgcccacctagcttgggtaagagctgctccagcccttcagcattgtcctcagcctcatgcttgatgcctctgcctcagatggcttcttccagaacagcacgatagatggtaccttcctagtgcagattacaaaaaccaagccatcctagatacacagataccactcacctcagattaagtatgggcccatggtcacagaaaacagtcttcaaaagatgaatgccatttccagatcaacaatgaatcctggaatttgatattgaccatgagcccaaagaagctggtggataatctcctggaaaattcctctgtagtcctggcagccaagtggaaactgtgcccatctcctggtgcgcggccatggatcacagtgtggcccagaaagaaatcagggagggggcagtgccatgggtcacagtgtggcccagcaagagatcgcggaggggggcggggcagccaccaagcactcactgagtcccagggagtcaagatggcagcctccaggaggccacacaggaccctgagaaaacagaggagggagacagcccagaaggtgcactgggcaggtgaggggagaggcacagctgcggaggtgtgctggccccgccaccctgtgaagtcggctaggaatggtttcccagaagtggataaggaccgatcactttggatttaaccttgagaagaggatgaacctgagatggaaatgaaggtttcctggggcaggagggacacattcagagggctctgagcctgtctgttcttcagaaagacagagagacaacatttgcagggccctgtgaacctacccgctagggcctgaagggcctgataggcttggtgggcctgatgggcttgatggtgggaagtagagagttgacccttcttactctcacccttgaagtttgcaatgctgggaagcacattagattcacccacagagctttagaagaatacccaggcctcagccccattccctagagattctgatttaatatgggtgaggcatgaggcccggacatcatcccagaaaattccagtgtgcggccaaggttgagaattcctgacctagcccatatgtggccaagaaacaagcacccctggtcccagcccctgctccatctgcctctgacttctcctctcctagggtccaggctcaccttctcaggagacgcccaaacccagcaccagcccacacccgcctctccttgctacacccagagctgcaggaagatgggatatgtgggagagcaccttgtaaatgcctggtcattcctcatctgtcacaccccattactgccactccctgagtacgaattgccctctgttttttgggaatgagttagtgccactcccccactagaccctcagcttcccaaggactggagtcatgacatctgtgtctcctctccctctagttcagaaacagagctagaaacagagaaagccagcgataaataactattcacatttcctgtgggccaggcgtgatgccaagctccctaaatgggttttcttctttcatctctgcaatagccaagtattattgtccccattttaaagataagacactgaggctcaggggttcctggaggtggcctggcctcaggtcctaggacggggaggtgctggcttggctaagaggtcaggaagcttcccagcagggagggggaatgcagcagtgtgcagcgctatggtccttgaggatctggtgagactccttccctcagcagtcagattccagaggtgacaaatgggaaagggttttcttctttccagtcattgccttcagctagacttggctgaatcttccttgaccatcccttactgatatcttcttcaaatgtcccctcttcagggaggctgtatgtgccattccattaacaaaacagtcacccccctccttcctttctgctatcctgccacctttctctaaagcagtgccccccagagtatggcccttgggccactgccagcccataaactgttacctgtctatgacatggtaagtatagaaataaagaataggtatttagaaaaggcctggagcggtggctcatgcctgtaatcccagcactttaggaggccgaggtgggcagatcacgaggtcaggagttcgagaccagcctggccaacatggtgaaaccctgtctctagcaaaaatacaaaaattagttgggtgtgatggcacacgcctataatcccagctactcaggaggctgaggcaggagactcacttgaaccccggaggtggaagttgcagtgagccgagatcatgccactgcactccagcctgggctacagagtgagactccatctcaaaaaaaaaaaacaatgtatatagcaatctttccagtaattcattttaattgtattttttaaagtattggtcctcaacaaaattggacactttataaagtggtcctcacctcaaatcatttgagaaacacggctcaaagcccttgctgccaattgacagacaggcttgtttgtgtttgttgttcatcctctgcctccccaactccaccgcccactccacgtggcaaggattcactgggctttgttcactgctgattccctgggcctcaatgtatatctggtgagtgaatgaatggataaatgaagcaatcaacctcaagtaggtctcataactttctggtcacttttgattattgaatctgcatccgccaggtgcggtggtgtgcacctgtagtcccagaacttgggaggctgaggcaagaggatcacttgaggccaggattttgaggctgcagtgagctctcatgacactagtgtactgcagcccaggcagaaaaccaacactttgtctctaaaaacaaaaataaagaaataaactcaatccaatgtccttcaaaacaccaactcacatctagtttaaatctcatcttctcctgaagccccacacctgcttccccactcagaacagccttgactcactgcttgccagcaaggtttgaggtttgaggaaagcacatctcacataggagcatgaacacccagtcatcctgctgaagaactacaaaaggacccctgcccactctttacctcctcccagtgcagcctctggaggggattgtgatctgtctcagtcacttgctccctcttcccccaacagccacctcctccaggatcagacgacagggggtggcttcaaggaggcagagatctttttaaaagactggacatcttctggtgtgaggaggggaagcaccaaggcctcactttctgaaggcctttgctgaagggccagtcactcctagcaggtggtgatgtctggcatggcccaggtggcccagtctgtcttggctctgcctgtcttcttaacctgggcagccctctggctcaagccttctcctccacccatctcttggcaacttctcaaaaccacagcagttgctggactattaaatcttccaaaagctggaaggaaccagcaaggtcttcctgaccttttcttattgggccctcccctccacggttctcaccctccctgccggtacacctgccccagctccaggcgaggagcagggttggcctctatgttcccagggaaacaagtctgggtgctcccatggtggcctccatgacatgggcctgtagatgctgtggcctgatgagtttctggagtggggcatgaatgccagtctctccttctagtgcctacaagtgattcttttgggccctcccccaacttgcatctgcagggcagcacacccttcctcccatgaggttttgtggcccccaggggactgagcctcagcttcctgcccagttccctttcctcatgtagagtaggaaggggtttggagcactgggtgttgggtagtagaggcagggccagttctgcctcctctcagaggccctgaaaaagacctcttccatgattctggtgactttcttcagactgtggcacctctttgtcctcagctttgaatgtgtggccaacagaagtccccctcaacaacctgccacatccagtcacacttggtgtcacattgagaaacttggcctttataggtgatggggtaggagggtgctgctaaaaacttcaaaccgggcaatggccagattgggttagaaagagctccctccaaaggcagcgtggcggccagcatggatgcagagacctcaccatccccagacaggcatctggcccctcctctggtcatgcccctccctacggaatgaggactctgcaaagccaaggggtctcgcctgccagaagcctgtgcccacctttgagaccacccatccctgccaacaaagtgtccagtttcagaattccccgccaaatggccctgagccacatccggcacctgcctgggcctctccagggtcagtcttcccaagggcagaccacagacattattcagcactccaggcccaagaagcggccaatggggggctatttgcagactgtgaacaggctggggcagccacacacgtgtgggtcagagccagggtgggccatgagccagaggcttccattttttctcttgccccagccctctagatgttacagtttagacctggggcagagacacctttaaaacactggcttcttcaccttggaatcacctggtgagctttaaaaactactaaagtctgggtcccaggttcccccgttctgagtttattggtccaaggtgagaagtgagttaggggcttaaagctccccaggttctcatgggcagccagggtcgagaggtgctgctgtagagacaatgccacggtccaggtcagagagaacaaagggagagaggagggtctgttctaggcagctgggagacaggctcctgcatgagtgagtggaggcagccatgatggaagagggagcgtgggaagcctctgtttggaggacagagctgcacatgtggggtttggggtgttttttgagatatccatggggagatgtctagcaggcaggtggatacatggcctggatctcagttcagatctctgggcctgaggtagagttggaattaccagcacataaatggtggctgaggctgtgaacttgactttgagccaagggcatgtgggccaagaggagaacatcagttgtactcccaaactccattctctgtctgtcgatccattcctccatcctaggccagagtcagtttagtagtagaggggcctccataatttgggggaccagagtccctaatcagttcgcctacagcaggatggttgtggggagaccttaacaacaatctgctcttctttccctcttgctccaccctcacaccccacccccacccccatccaccacctgccccaaccccatgcccttcctctcctttcctcctcccacctgcccccactttgctttgcctgtcccatctccctccttgacaccccctcccccaccccaaggtgaaggtctggttccagaaccgccgcaccaagcagaagaaagaccagagcagagacctggagaagcgggcgtcctcctcagcctccgaggcctttgccacctccaacattctgcggctgctggagcagggccggctgctctctgtgcccagggcccctagcctcctggcgctgacccctagcctgccaggcctacctgccagccacaggggcacctccttaggtgaccccaggaactcctccccacgcctcaacccgctgtcctcggcctcagcgtcccccccactgccgccccctctgccagctgtctgcttttcctcggccccgctcctggatctgcctgccggctacgaactgggttcctcggccttcgagccatacagctggctagaacggaaagtgggcagcgccagcagctgcaagaaagctaacacttaagactcccaccctgtgacactgagtcccgagcacagcaccttcccagtctcctgtgccccagcggacagcactgagcaggccccggagaggaggggctgcagccacacactcttccccacctgccccccagctcagagactcgtgaccaaatggccttggtcccgcagcttgtgtgcgtgagtgcagtgtgagtgtgtgtgtctctcactgaaataaaaggaaaacaatgacaagaagggaaatggtgcccacagcacaactacttacccctcaatcccttctatccctcttgtcactggaagggaaaatgggcttagagtcagagggacctcagatgggagagggcagaaactgggattctgggggtcaggggactcacatgtgtcggtcagcaggcacctgattcccactcaatagaagcccatggcaccaacacgaattctttggttaaatgttgccctttacaagctctctttcaaacataaaaatacttgagagagggaaacattgtcaccttgaagagggtgaatggtgaaaggggagaccaggttgagagagagggagagagagcatcaaagctaaacacaagcaagagtccagatgtttagagacggcctacccatcacaaactgcaacatgaaaccctttaaaatatctatacacagcctggccaacatggggaaactccatctctactcaaaatacaaaaattagctgggcatggtggcgggcgcctgtaatctcagccactcaggaggctgaagcaggagaatcgcttgaacccaggaggtggaggctgcagtgagccaagatcatgcctctgcatttcagcctgacaacagagggagactctgactcaaaaaaaaaaaaaaatatatatatatatatacacacacacacacacacacacacacatacatattatatatatttcatattgctcaaacaatataaatttttttaaagttaaataagagtcttgctcaagactcttttatttaactttttattttgcagtaattatagatttacaggaagctgcagagataggacagagaagttccttccattggcaggaactcaatagtatgagacagataggcttcatcttccctaactatagtacaatatcaaaactaggaaattggcattggtaccgtgtgtgtgcatagtgccatgtcattttatagattcatggactcactgctgcaatccagatgcagacctgttccatcaccacagagatcttcctcatgctgctccttgatggtcacacccacccccgccctccacaggagagttctttgaaaggatgggcattaggaaccagagacctgaaatgggtcctcaggagggaggatgcggggtaagattttgactctgtgaagagaaataacaagcacagtctcctccagtctgctctgagaaacatagtagctgctgctttggtttcaaattggctgtcctgagtcacctggagtgggtgcttggggacagtgatccctaggcaaatgtacttctgccgttccctctgctcagtggtatggtttggggaggagcttagaaatgcagaaatcctgagcctagaatgaggcatgggggtgactagaagaccttgggttgggcaggtccagctaccacccagggtccaccctgccttgcccagaggaactgtaccacactccactcaccaggagaaaccacaactcttagtttcatgacatgaagagagagttcttgg

SEQ ID NO: 662 - DNA, 246883 bp, Homo sapiens
  source 1..246883: mol_type = genomic DNA
ctttctaaatgcaaatctgcttaaaaccttttaatggtgcttcatcatcttatttgtgatttttttttcttttttatctttattgctgccacacaaattaatgcctcatcatgttaaggaaaaagtttagacccttggcatggaaccaagtcctaaatcctgtggtcctgcaggccttttcagcatgactctgaaccattttccatacaccccttatgtttcaaccctagggaaaagcttacgttttgcaaatggaccatgttccttctccctcttttgcatttgtagcgtggttcaccctactgaccatttgctccttgtttgtccacagcaatcctactagttctttaagactagctcattttctatcacctctgggaagcagtgagggagtccactctgagtttaaagtcacttacaatggtgtcttctcttgtgtttccacaggaccctgtgcataccttcatcaaggcacttgctgcgtagcacttatatttctgttgtacgtatatgtctcttccactaaactttaaacttcttgaagagaaaaactgtgtcttttatctttgtatctccaggccaagcatggcaactgttgcttagcacctgctcagttaattgctgcagaataaaggagttttaatcccttcctatcacttctggaaactttactcaagcaaagtcatttttttcctctttctttctgtatttttaactccttcatctttcccttaattcttactcatcttaaaaagagcaagaaaacacttgctccatcttagccccttcatcgtagccccattttgttgaaagaatagtccaattattgctttaaagtccaaacctcccattgacacttcagcctactaaaatttgatgtttactccctcactcaaatggaattgttcttcccaatgacaccaattgcttcctgattgtggaagtcaggctttatcttaagtgattactcttcaggatttcaaattgttgccctgtttttcctgaaaaatccttattaatttggcttttgtgacattgtttctcctggtctacataatctctcaacactaatcagatacaccagctgcctttacttaaatgctggtgtctcaaggaacccttattaattcttttgtcttcttattctctctgggtaatttcatctaattttgcatctttggtgactacctatatatccagtgatcctgaattttgacctccagaactctatttccaatgtgtaataaattctgtgactcacaataccctcaaactttacttgttaaaatggaattgtttcctttcgcaaacatggccccttttatatttcctatcctagtaagttagcaggagggtcaaggtgttgaccattcataatctttctccaggtttctatactagactacataatcaataaatttcaaggaaaaagttatcccttgtatgtagcccaacttagcttttgtattagttaacactgcataacaaatcaccacaatttagatttaaaacagcatacatttattatctgaaagtttctgtgggtcaggagtccaaacgtgatttagctgggtcctctgctcagagtttcacaaagctgcaagcaaggcgttggctggggctgggcttttatctgaggttcagatgcttcttccaagatcacatggttgttcacaaaacttatttccttgcagccgtagagctcatggcagcttgcttatttaaggctaataggagagagagtctctgactggttcactctcttttaaaggactagtctgattaggtcaggcccacccaggggatctctttgattaactcaaagtcagctgattagaaaccttatgtatatctgcaacttctcttcacttttgttatataacataacataatatgggagagatgatcccatcacttttgccatattctgttggttagaagcaggttacatgtcccacccacactcaatgggggagaggattataccaaggcatggattattgagaatcactctagaattctgtctatcatagtgtaattatatatctatgtagtgaaaaaaatagatgtttgtaatttggaggtattaaaaagttgaatacaaagaaaaaattatagaactttaaagtcttaattttaacggagatggcacattattttgaagatagagaaaatggctttctatccttttcctatattacacttagtgccttgggcaggatatatgtccaagtatctaaactgtagattatattatatgaacttaaatggaataattaaataagtaattctgaaagacaagtatttaatgacataactggcttgatttgggaaccattttaccatgtgttagcctcagttgtagtaagagaggatcatgtaattatatgtctataagtaagttatatggtttttctcagtgtacattagttcaacgtttctaaaggtttttttttttaaagttttcttttaatacctttgacagactgtgattttcatcagaagtgctaatctttcctcaggatggagagttcaggcatcttttcatgttgttttctcacagttttaaatgacatatctacagaagttcttttatcagtgacttttcccttcctggccccacactatctgagggcatactctgtagctccttttattttattttatttttgtgggcatcagatatattctgaagtcaatactaaagctgttagagtatgacatttactaagaatcctgccattttaggcccttcttcttaaaggacaacaattccattggtatttagtaaaaaacaacatggcttggtaaatttagctctttttcttgacattggcaatgataatacaatgcctgtggtgtataattgtcatggctgacttataaatccctacagatatgtggttacttctctactttccctttctttggcttgggcaactgccacgttgatgcactggagccattcttctgcattcttctcatccttggccttaaagacataggttttattgtctgtgaagatttcgaaagcccgggggagagagcggtccctgcgtttcttggccacagccttcacactctgtactttgctgagttctattgggcagtcgtcagggtcatctttctgaaaggcatgggaagaaaagaacatgggctggctgttactgtaggcaaggatctctggctactggagaactttctaagagggccagaatcctttcactttttatgtctcaagacctttgttattttgggtgctaaggcctcagaatcattagaataactgaaggagtgagcaattgggcctttgttagagtatcataagttgacacaagataattaatttaaaggatattattataaagtgggatttgggaaaaattcagagttctttcattttctattaacgttatattaatagagcaaggtgcaacggtacaatttggagtgctattaacttataacttcaggtagtttgggaggcatgaaattgaattttcctttgtgctacctctgagaaagattttgccaaaccttaattgaatagagaggcttccagtgtttgcatagaccaaactgtttttgaaactctctgcagctttggaagcatgctttgtctacaaacagtaagagaagaaatatttaatgatgttacatttgccttttattaaagcaaaaatttaaggacctctacaataccaaagtcatcacactgggctaagatgaataattttaaggggccagatatttctttgaagtaatttcaggtctttcacatgaatacattttgtctactagagaaagtacctgtggttgagaatcttgccaattctccttgcccacctctcctgttgcaatcaccctcctttcactttgcaatgaaaaagcatcctcttcactcatcccatactttctatgatgttttgtccaatgtaaacaaatctcagaagcaccaaacaaaaaagcaattccaactattgacatcagggaagtatccatcagccaaggcaatgtaatcactcctcatctatttcattatgagatacattttcaataatatttcaatttttaatgtttaataattattaagcttggcattatacttatggattttcatgaaggatataactttttaaaaagataactaaatcagaaaaaataacacttggagacggatggtcacaaggaatttaaacaattaaatttcaatttatacatatagttttactcagtgaaaaatgaaatgccattcaggataaaatgctgtgatagaggtagaacagaaacatgatttaaaaaaaaaaagagaaacaatgtgaacacttctatttaaaaaagagttaatttatgtattaaaaatagtgttaggtgttaaactgctatggtattttaatccaatggttacatttaatggagagatgtaatccttttgttttaaaatgtcaatatttacaattcaacagaaattacagtccgggcaaatgtttaaacttatgataaaagtgttgctgcaacttaaaatgctgcaaggtattacatagatttttcaaaattcttttagggtacacaggataaagtttgaagacatacacactagacaatactttgttagcctaatttggtttacagtaagtatctgacagtaataaaattgcatttctttgaagtagtctatagtacagagattgatacgaaaataaaaagttaccatagtaatttaaagatggacagtgaatcaactgagacaggaatagatagaaagtcaaaggacactattgcctagctagtttgtggagatcaaggtcttaaaaatgcaaaagtgaaagattagagtcttccactagagtctttcaacctcagctctaattttaaaatgcacatttctttcatttaaaaggggcccttttacaaggacctgaagcttcagcaggattgttgaccactggtaggttattgtttccctggagattagaggtattttgctgtggccttcatgctatattaaattatttcccactatttgagccgcaagttttgtcagagttatggaatgtcagaccattatttcctgataaacatgtcaaacaagttacctaattataaaattgctttttctttaaaccttattaaaaaagccatgaatcagaaagtataaaggtcattatttgagttcagaaaaacattctcatagattaactctgctttgtcttaagggatctggaaaattactacgtcttcatttctattcttgatttcttgaataaaaacagaaaattcaggtagtcattttaaacactttaaacatgctttagtgtgaacctatgctaaaaaaatttctttaagtttccaatagctgtctaaattgaactgccctttcaaaaagatgttcagctacagaaaagtccatctgtatatgttataacacacacagatgaagaaagtagcatgactacacagtaggtatcacaaaaaatattctttttcattcaaaaagttaacagaagtcttattaattaaaagagcactggtcagaatacacgatacttgattcatactgattaaaatgttcaaatacattttataatgagtactctaaagatatagtgcatatggccgagaatgaattataatttttaactaatttaccacttttcattaattaattcagacagtttggtttatgtgatggttaatttatgtgtcaacttgactgggctaatgggtacccagacagctgggaaagcattatttccgcatgtgtctgtgaggtgtttctggaagaggctggcatttgaattagtggactgagtgaagaagatccatgctccccattgtgggtgggcatcatgcaatctattggggacctggatagaataacaagttggaggaaagataaatttgctttttcttcttgcactgagacatgcattctctcctgcctgtggatatcagagctcctggttttggggccttcagactctgggacttacatccctccccccagctcactgccatacccaggttctcaggcctttggccttggactgggagttatatcattgactcccttaattttctggccttaggacacagactgaattacaccaccagttttcctggttctccagcttgcacacagcatatcatggaacttcacaccctccataatttcatgagccaattcccatagtaaatctcgtatatgtctttatatatcctattggttccatttctatggagatccctggtgagtacagtttaccactgactctgtattttaagtatacatgggaagcagtaaactcatttaagaacatgctttggtgtaacactgcctgatcttgaccccagttataccctttctcaccttattagctttatccttggacaatccaatcagtttctttgactcagtttcctcatctgtgaaatggcaataatagcagtggtggcctaataggattgttttgaggattgtttgaggcaatccaaggtgttgcatagtaggcactgaaaaaatgctagtcattatgattattttctaaaatagccaagaagtaggtcaagatttgattcctcttgatcctgaatcaggagagtttaatgatacataaaaccaatttgaaaagaagagaaggtaactttgcattattgattgcaatggaatgctacttcagaggtttcccactgaaaattcacaatacaaataattactgaacatcctattcaaatggaaaattatattaaatatttattaatttgatcataattctattatattcattaactgaatattaaatagatgaaagacagtaatattttaatcagaattaaactttgttgactataaaaagtacctaaagtaaatcagccttcattctttcctccttgtctatgtcctccttttttggacccccatttccaaatataaactatagctataaaaaaatcagagccaatatcataagtcataaatttgtgtacgtggtccacaaggaaacaaagggcacggtgtctgagtcaagacttgcagtccctctgcagttcaactaaaaagtcaactaaaacaagcttccataataaactggaaggggacagtgaatcaactaacataggaataaacagactagacacagaaatgtgtgataaaacaatgctgtaagatggtgaaatggagatggaaaaattattagagtttaaacccaagacaaaacgtttagctattggtggagatcaaaaccttaaaaatgcaagtgtaaaagatgatggaggaacttacagactttcctttttgaaacagaagttgatttccagccagtgtaaaatagcgtgttttccaccttttgatgaacttccatctgacttgcttctctttaagttttccttctatgagaggctggccatcttgatttacaactgttgaaggtagcagaataatcatgccatgtattttccaatatttactaggtaggtgatcaaaagtcagaactgtacagtgtaccagaacccagttagcacacctggaaagtaggctaataaatgatgaatttggttaacctttcctcctttgtccctaaaagaatgcacaattcagatatgacaatggaaaactgttgaaagccctcattgccattttcaaaagaaattggttcacacaaagagcatctgttagcagtatttaaagtttatctggatatttagctttctgtgcttggtttctttgtttcatagtgttctgtttctaatgttggaataaccaaattaatttggaacagtttgaaatgttggcacaaagtatctagtatgccataagcttcattttgattttgccagtaactaggtaataaaaaacaaatttccatgctttatgacacatgaactgctggaaatatagctttataaataatcataaacccaagtatatttagctatttggcagcaaaagtcaatgcagcactccaaaagacatggttcctaaagcggtaacaccaagcagcaaaggcaaacttacccaactcttgtacatgctagtctcactctctggaacacatgtactctctttcccctctctgtattcccatcttcacctagtcaacaactgatcacttcacatttcaacttaaatgttgcttcctttggaaagccctctccaaatccagatgagggtggctttcccccatatgttctcatggcacatggcatgtttcttatatatcagggattatcatttgtagatagatattagtgcttatctgattaatatctttctgtctcattcagttgaaagctccacaagggcagggtctttgctttgttctctgttgaatcaccaagcatctaacatggtgcctggcaaatagtaggaagtctataaatatttgttgactgaatggactaattttacattgaagcagagtgtgcatgattacaaatgatcatagaattagaagatccattgcaatgtcagagtttagacgctgaactgaataattttattccttttaccaacaacataagattcactcttcaaattcagatgaaagcatctgatttcagcagaaggggacaatggaaagctccatctgtagtaggacaatgtttatttatatatatttatcttcaattttcatagcaccttgaaagtaataaaatttgttccatcagtttggaaaaattctggactgtgcctgtttgaccctatgaacacaacctgccttttgtacactaccatttcttttttctaatataggtctaataattgcctcacaggattgtccactttcacagagcattttcaggataaaaataataaaatgtatagttttcttttcttttcttttctttttcttttttttcttttttttttttttttgacagtttactctgtcaccgaggctggagtgcagtggcacgatctcagctcattgcaacctccacctctcgggctcaagtgattcccctgcctcagtctcccgagtagctgagactacaggtattcgccaccacgctcggctaaatttttgtatttttagtagagacagggttttgccatgttggccaggctggtctcaaactcctggcctcaggtgatccatccaccctggcgtcccaaagtgctgggattacaggtgtgagccaccatgcccagccgaaatgtagagttttcataaacaaagtactattaaggctatttttttttccggatgactattcaattggctgttccattgtcaactccaaattaaggctaaaaactggccaggcgcagcagctcatgcctgtaatcccagcactttgggaggccgaggtgggtggatctcctgaggtcaggagtttgagaccagcctggccaacttggcgaaagcccatctctaccaaaaatacaaaaattagctgggtgtaatcccagctatttgggaagctaggcaggagaattgcttgggcctggcaggtggaggttgcagtgagctgagattacgccactgcactccaggctgggcaacagagtgagactccgtctcaaaaaccaaacaaacaaacaaacactgaaaatacatatcaaatatattgtaagatagtgataaggactatgatgaatatagaatagggagtaagtgacttgggggcttggtgtacatgcatgcatttcagtggtcaggaaagagcttggatgtttgaggtgatgacatttgatctgacacctcagtgataagacccccaatcttctgagaagctctggtggaggctactactgagcatagcagaggcaaaagaaagcaggaactcatgaaatataaacttacaattaatatcaagaaaataatttcagagttctgctttgctttgataggaattgtctgatgtggagcattcttaaagctagtaatgatctttgcaaatttaaattttccataaacatggtgatttcctttgtgcaaccacatctacagagacttcagttaaagtgcttagggcactgtgtctccccactgggttatgcgttccttgagatcaggaacagccttaacacagtgcctgccgggctagagcctcagtaaatgtttattaacagtacaccattgagtcacaaagggtgcagcagactatctgggatgaggaaagaaggtttcaagaggtgatccaagaggagaaaaaaggggaaaaataagttaaaacaaacaacaaaaacaaaataccaaagccaaaattaatttaaaaaatttaaaagcacccatttttcatattttcaggtgagagaaaatggtaatctaattgtaatatctgaaggtttttaatattaacttagaagatttagatttgaatcctctaaattacaattttctaatcagcaagagaaaataataatgccccctgggattctgggaggtcaaaaatcaaaagaaagaaatttatgtgaggacactaggtaaatagcaaagcacaaggcactgcttctccctcaccctagccccacttctaggaaagacttgactttacagtttttttgttttgttttcctaagacagggtgtcactctgtcacccaggctggagtgcagtggtgagattttggctcactgcaacctctgcctcccaggctcaggtgatcctcccacctcagcctcccgagtagctgggaccacaggtgcacaccaccacacttggctaattttttaatatttttttgtatagacaaggtttcatcatgttgctcaggatgataccatggttttaatgacaagatgatttaatgtaatgctatttaatagtgatacatttttcctgtctcagtctttcatatttactcaaagaaacatttgaaatagttatgatatctgagatgatttgaaataatgattgacttaggtaatatttaagtacatggatccttttggatctgacatagaggattaactactttattttttctcaaggcagatccaaatgtttcacttgaagagtaatgtgtgacaaaagtttacaatgaacactgggcaaaattgttggagtccttaaagacatgggtgaatgggatataataactatgatgagacagtcaagaccaaatgataggcttactaacaacaaaggatgaaggacttcagagacaagctgggaagcaaagacttttcaccgtagcccagtgaaaatcagccctaggggaaaaaaatcaatgaaaatggttttagaaaggaaacattagcagaactttaaagtagctgaatgtgaggccccaaatttaggtgttagagtcagtttcagagaagtcagtaaaagccaggctatttggagctgtgagattaatttaaaaataatttcaaaaaacaaaacaaaatttttatatcccgtatcttaaaaaactgtttgtttgtttgttttttgtttttgtttttgttgttttttttttttttttttgctattacatctaacatatgcatggctggggacgtgtcattttaaaggtctattgcccatagtacgtccttttaagcaggtgattcagatatgttatcacagcctcttcacagctaaaacaagaaactatttttctaagatcatcatattccatttgaaaaataacatgtggaatgatctacgagggtatgatcatgtatcatctaaaataaattgtttgcatgtagaacatagaggatattcaatcattttctcactttccaattaacacattatttcatttaaagcaccacaatttggccaggtgtggtggctcatgcctgtaatcccagtgctttgggaggccgagacagagggatcatttgaggccaggagttgagaccaggagtttgtgaccaggctgagcaacatagcgagaccctgtctctacagaaaaataaaataaaataattagctgggcacggtggcatgcacctgtagtcccaggtactcacgggggtgaaggggtgcagaggtgggaggatcgcttgagcctcagaggtcaaagtgtgcagtgagctatgatcatgccactgcactccagcctgggtgacagagtgaaatgccatctcttaaaaaaaaaaagcaaaacaaaacaaaacaaaacaccaaaaaacaaagcaccacaatttggctaggacattctctactaacatggatctgtttattttttaaaatatcaactggctataaaagctatgggttattaaactgaattttctagtgcaattggaacccaaactgttactgtgtttgtcaacttaaaagtttttcagaatgctaatacaaatgtttatatgttaattttatcccttttctgcaccaagttaaaaatatttgttgctaaaaaaatgaattttgaaggggttggtcttattcaacatgaagttgatgagtaagtataataataacaggtctcccagagctgagaagacccacagcaggaagaataaaaaataaagaatattcatctgctcatttatcaatcatccacccaccccgtatgtattttcgagcacagataagctgtaaggcactatatttggatctgaggggtcataaaatcaccctcacagggagctttaatttatcatctagggaagatatggcattttacaaattctactgctcagtgtagggtttggcaagtgccaccgagaagtacaagccacatgttacagcatttgaagagcagaaattccacttctagttgagacaaggtgacatgagagctgggaccctcatgaagaagagagaattttccagatagagtgcagaaaaggatcagataggattttccagatagagtggtagcaaggtaggtgtgtgggggaaaacacacaaaagaacctgaagaagccggaagaatcagcaaactcagaaacaagtaaagcaggtgctctcgaacacccctcatgggctgaggggtgaagggagaagtcaattcaaggctttctaggtgtaagatccaggaaagagattgagtaacagtcacagagaggtcatattggactttatgggaaagtttttctgaagcccctttagaaaggactaagaaagggcctagagcctgcgagggtccagctagcccagcatgaagcctcatgggccccagatgggatcaatgatgtgtcaggcagggtcttggcaggaaacagatggcatctcaaactgagcagtggaggagagttaatagagttactagattatttactcagatgtgggcagggcgtaggaaaagcgccatagtactctggggccagtaaccatgcaggcctaacactcctccgcctgaagaggaaagggcagagaacagttaggacttagtgggagacctgtatggagagcaccgtttgataacagctgtggcctggaatagaggacactgtcgaccctcggtgtccaagcagggaggcagccagcaaatcaataactcaacctctctctcctccctccctctgcttactggtgtccccagtggtggaaggtacctgaaagccagagctaaaagagcctattgaaacaatcactacatggcagcctgtgggacatggagctgggcaggagagatggaaaacagaagcgatcaggcactgattatatgtcaaattcaacaaagttcagatatacgagggaacttcaaaagttcatgaaaaaaatggaattagaagataaaaataaaaagtggaaactgtatttctcaacataaactccatcaagttcaagacactttggtaagtggtaatatcagccatttagtccattattaaagagctaagggtcctgggaatttaaccatgttgatgcagtcgttttaacattattaactgaaacaaaataagtgccctttgcagattttttaagattaggaaacaaaaagtcagaaggagccaaatcaggactgtaaggtggatgcctaataattttccatggaaactcttgcaaaatcgcccttgtttgaagagaagaaccagcaggagcattgtcttagtggacaaggactctctagtaaagttttcctgggtgtttgtctcttttcttcttccttccttccttccttccttccttccttccttccttccttccttccttccttcccttcctctctctctctctccctctctctctctctttctttctttctctttttctctctctttctttctttctctttcttttctttctttctttctttctttctttctttctttctttctttctttctttctttctttctttccttctctctctctctttcttctccctttctttttttttttcagggtctcactctgtcacccaggctggagtgcagtgacacaatcatgactcactgcagcctccagatcctgggctcaagtgattctcccacatcagcctccctagtagctgggaccacaggcacgtgtcaccacatctggctggttttaaaaattttttatttttgtagaaatggggttaggccatgtcgcccatggtcctcaaactcctgggctcaagcaatctgcccaccttagcttcccaaagttctgggattacaggcatgagcccctgtgcctagcccctgggtgtttttctgctaaaacttttgctagctttctcaaaacactctcataataagcagatgttgtcattctttggccctttagaaagacaacaagcaaaatccctcaagcatcctgaaacacttgccatcacctttcttcttgacagatctgcttttgactagaccaaagtacgcctacaacttgccaatttgcaggtagtttgtactacagacatggtggtgattcccttattatggaagaagggtagaaaggagttagagggggaaaaccatgggtctaaagaatagagaaaaatccttttatctcctggcggtggaattgactagaaatgaataagatgcccccagtggtttcttctcagttaataagagaatttagcattcatgttattcttgtcatggaagactgagttccagtttttattaatacccattgccattcattgattctcccattcttctattcaaaatgcctttatggttaccatgcactaggcacatgccaggtaaaggggatataaacacaaatatgacagtctcaattattgagatgcagagaaatgcagtaagcaagtgagtacagagtgggataagtaccaggctagatctgtgcacagggtctaactggaacacactgagaggcacttattctaaactggggcatacaaagcagaaaagcttgctagagtagatgctgtctgggctgaattctcagggacaagttgcagctatgaaggcaaaggaaggaaggtcattgagccaaaaaaagaagtaaaaaagaataaaagttcatagcaaaggaccaaagctgaggaagggaggcataaaatgcattctaggaactgtaactcattctgggagggagcagggtgggagagaagaggcaagagatgaggtgtgagaatcagagagaccaatcctaaagagccttgggcaccatgcagagtggaatgtaatgctttgtagtgtaacataatgaaaaaaagcttgtatagtcatagacctcttttatttcaagagcacaagagttcaataattcactctctacctggttttaagatttgttgcaattctgaatgtctttaaccaattataatttatttaaccagtgtgctgaatgccatgtttactctttattataatagatcacatgagactgtaccaaagactttctctagtataggcctatggtttatgtggtaagagcactgtctttggaggccgacctcagttgaagtccagaatctgccacttaccagctgactggtcctggacaagctatttaaagtcactgagcttccctttcctactccctagagttatacttaacacaacacaaatggctgtgggggttttgctagtgaagccatacatccccgtgaggattacatgcaccataaatgaaagcacataaaagtgccacaacagttgacagtggccttgcttagctgagacctggtcacaataaaggatcaataaatagtagctactgtcatcatgattgacatcatggatcaatgcaaatcataatcatcttttcactgtgatgaacaggtggttttagaaataccatgtcctaatggcctatatcaaagtgtgaggaatagtaagagaattcagagtaagagagggactcctgcagtctttgaacttggacctttaataaaaatggaggtatgaaaggcaattccaagtgtctcaaatggaaggtgaactctctgtctctctgtctgcatgtgtgtgtgttttaaagacagggtctcttttgttgctcaggctggaatacagtggcttgatcatagcttactggaaccttgaactcctgggctcaagcgattctcctgcctcagccccccaagtaactaggactacaagtgcatgccatcacacctggataatttttaatttttttttgtagagatggggtcttaccatgctgcccaggctggacttgaacttttgacctcaagtgatcctcccatttctgcctcccaaagttttgggattataagcatgagccactgcacctggccctcttctgtttttgagtaactcatccacgtattcattgaaacttccatttacaagacagtaaactgccatttacaagactgtaaacttccatttacaagacagtaaatcaatctacaacccagtaatagattgagctgctttgggagaatttcctgttatctgtggttgcttccttctcttcctagactttctgcttgtttctgcttgttctcgtgacagtctggaaggaatgacaatagacaataacctccacataactactgttcacatggcacactgactttcatccagactcagaaattactcatactgtgtgctttttggcttatgccagttttgtcttgaaagtattgcactgtgcatgaataactcatatttgagactgtcatgagtttaatttgtgatatttgaatttctagatactcttttctgattgttaaagataaatgccttcaaaagaaaacatattctggaagaaaaaatataaaccccaggccaggcaaggtggctcacccctgtaatcgcagcactttgggaggctgaggcgggtggattgcctgagctcaggagttcaagaccagcctgggcaacatggtgaaattctgtttctgctaaaatacaaaaaattagccgggtgtggtggcatgcgcctgtagtcccagctactcgggagactgaggcaggaaaattgcttgaacctgggaggcggaggttgcagtgagccaagattgtgccattgcataccagtctggtggcacagggacactccatttcaaaaaaaaccaacaaaaaatatatatatataatgattgacatgtatagatatatatcaatatatagatatgtagatattgattagatattgaaatataaattaactccaaattcttagtttttaagtaagaactgagaaaaagtatagtatgtcattttttcccccttgaaaacactgcttctgggaattatgaatcctatacagtctatggggaatttctttgtatgtatttaaagtttcaaatttacttcaatctccttccatggttttactgatttttttttctttggtgtgtgtgccagttctaataaagcaaactataattccagaggatatgcaaaaagagggctagaagcattaaatgaaggggtcgtaggagccacatttactagactgagtgtctgtggtttttgaaattgctaaggatcataacaaatggcatgtttcttaagaatctccaggcagcgtttgagagtgcaatatttctctactggcagtgaataaaccaggaggcatgatcctcactgactttgtaacatcctacacaatattgtggggaccaaaattggacagccaagctaagtttgacagcagccctttgagggcactgccacatgtgactgaatggcttcctttctcagtaatttcatacccatcaaaacatatgcttctctgaccaattactgatgtactgatgcaaaaaagcttcagaaatacggtgttgtaagcatttagggctatgtttcctgaactgtgttgtgagaaccagagaatcagaattatctgccagcttgttagaatgcacatttccaggaaccaccctaaactcactgaatcaaaattttgggatagggtgagaagccttgcatgttaaacaaggtccacaggtgattcttatgttgctcaaaaacttctaggaaataattagtatcttcgtggtagatgacagtaataggttatatgatatacgaaagagtaaaactgcaaaaccaattgtagggagaaaactatgaccttttgataaaattaaagacaaggatggcagtataagcttacattcatgttcttggtttcaatcaatagggttacagaaaaaatgttcagaattagtgtttgtggaattttgcttatttttttattgtgttaatagtgagacaaaaattttaagggcactttccaagatggtaacctgtttaatagttctgagtagtacatgtctttatgagaaactcatcaaagaagatttgcctgggactgctgtgcaatgactgatagagaccaataggaaaagatcaggagagtggcaatgaagaagataatttttttttttttttttgagataggatctcactctgtcacccaggttggaatgcagtggcatgttctcagctcactgcaacgtctggctcccaggttcaaatgattctctcatctcagccctgcaagtagctgggactacaggcatgcgccaccacaggctaatttttgtatttttcgtagatatggggttatgccatattgcttaagctgatctccaactcctgggatcaagtgatccacccacctgggcctcccaaaatgctgggattacagatgtgagcccctgtgcctggctgataattgtctaattgtaagattaacttttaataagaaagggtttcacacatatccgatgttggtcctactgagtctcattaataagatcgcgtggatagatattactgatgggatctggccataggactttagttttaaatgttgagcactttcccatactgcctgcagattgtagagtttgcctggggttggaaaaaatagatctgacaagcttgtgccccgtctgtgataaggaggaccaacttgtttgggttgtaccatttgaacacattgtaaccattgtcctacctgcctgtaaattcttgtattctggaacatattaaggtgttacctacaccacttttatggaatttttaaacaggagttccatctgttgtggttcagcacttggcctcaaaccttttgacaatgaatagatgtttataatgtctgcactggaagccttagcagttacataaacaccatcacatgctgtatgttatatatgaaacacacacatgtatatacacatatatgtgtacatatccatgtgtatgtatatttttaatacacatatatatgaatatatcacacattctattaacatgatctgtttattatagtacttatgaaaagaacttatttaagaagagactgcttatataaagaatatatttggcacaaaagagatgctgtaaatgtcatcatatgaatatctacctttttcttgtaaaatgagtcattgttaattcatttatctgttttttgtcatcacttgactgagaaaaaaattattactgaaaattttctgagaagacactaactttggccattcgtttattggtacatatttattgagcatctgttgtgtgctaggggctgaggatagatggatgaggagagtccacttcatagaacttactatttactggaggaagtagacattgatctaaaagtcacacataaaagaacaagacagcagctgtaaccaatgttatggagaagaagtttggggtgctttgaggacctcagtatgcatcggggggttacaaaaggcttccaatactgaagctgtgaatttgatttgtaataagaaggctaagatctactttaactaagtgaagaagggagagagggaattcttggtagaagaaaaagtacatataaaagcattgtggcaggaagaagtacagtgagtctgagaaactttaagagtgttcttctaggcaaagcaaagagagcagagggaatgtgggacaggataaagctggagaagctgggagagaccattccatgtgaaaccgtgaaggatatgttatgaagtttggtctttaagagctatgggaagctacctaagatttcatgcaaggggtggcacaacagatttgtgttttgaagagttcactctggctgcatcgtgggagggagattggaagggttcagagtagttcagtgaggaggctatggccattattgtaggtaaaaggtgatggcaacttgcactagtgctgtggagagaaatggacagatttgagagcaattgagaaagtaaaatcctcaatcttgtggtgatagattggatgggggtggtggagaaggcagtgagtgggcctctggttggtacaatagattgagtgatgttgcattcactgagctaaggaatgctggaagaagagtaagtgtttgggggaagcaaagagacaatcatgagttttaatttaaatgaactgatgctggggagtggtgcatgcttgtaatctcagctactctggagtctgaggtgggatgattgcttgagcccaggagtttgagagcagtctgggcaacatagcaagatcctatcttaaaaaataaaacaaaataaaataactgattttggggtgccttagaagcagtcaagtaagtggtaggtgatgtaaatcttgaattcagaggagaggccaggccaggaccgcatatatagatctggaagttgttgcatagaggtgattactgtagtaagagcgttactccaacaatgactagctaggtaaagaaaggtgggataagaaggagtgtccagagagtaggaaggaagctagaggagtgttgtgtcacagaaactgaagaagaagaatgctttaaggaggaattggtttacggaatggaatattgccaagagacaaataacatgaagactgaaccatgtgcagtgcatgggtgacttgcaggttgttaatgactacagagagagatgatagagttagaaacaaggttagagagggttgagtcatgagaaggaggcaaggcagtggatagagagagacaactctcttggctttaaaggggaagtgagagataaggcagtagatggagggaaaggggaggataagccacttaattatgtttagaagccaatgggaggactcagttggaaggggaatattgaatagagaagagaaaaaggttaatctaatctatactgggaagtttctgagaaggtgggaaggatgaaatccgaggcaaaatatgaccatcctttgatgactttattctctgtggctgctaaaaagtaccagtatgtcagttgggcctggtggctcacgctggtaatcccagcactttgggaggccgaggcgggcggatcacgaggtcaagagattgagatcatcctggccaacatggtgaaaccctgtatctactaaaaatacaaaaattagctgagtgtggtggcgcatgtctgtagtcccagctactcgggaggctgaggcaggagaatcgcttgaacccgggaggtggaggtagcagtgagcagagactgtgccactgcactccagcctggcgacagagcaagactctgtttcaaaaaaaaaaaaaaaaaaaggaccagtatagtaccagtatttcttttaaataggtgtatttgtggctgataaacaaatttcattcttagtgtacttacataggtcaatacaaaaaggattactctgcaatatgatggctagagctcttttaaaatatactaagtattttattttaaaaactgcacaaaattcttgaaatcaatgtcatcttatgcttgtatgatgatgaaactaatgtactcacattagtctgcctttccaaagcttctcctcatctatatattggcttgactcagcttgttctctatgtggaaaaggacacattactacgtatagtgatttgttagtggataatcacagaatgactgatgctttgttgcaagtatatggcctatctgacacttttcctctgtatcaagacaagattgttgacccaatatggaaaggcagaggagtaggaaagtgatgctggatgaaaaatagaagttaatccctgaggggtgttaggttactgatcttagcttgtttctcttcaagatttacaagttattagcatgtttactatgagctctttgcctatgtgtatattgtaacattttagcataatactaaaattcagtttccacaacatgttgaaaccttgtatacagcaatgttttcttctcatgaaagctaattttccaaaagatgctatttccaggtttcagttcagttagttgtttttaattttgagaaagagttagatttttaaaagttagattttcaagttgcatttcaaaacaaattcgattttttcccatgggtattctatcacttaagtgattaatgaatttctcaatcactcatctatttgccaaatgcttattaaacactataatgtgccaggcactggttaagatgtacaaagatgaggcataatccatggttcttcttgtagtttactgtccagagggaaagactgatggccacatgccaagtgcaatacagaagtgtaggcagaggatggaaaggacagagagagagaaattaattctgcttaggggtggtatgtaggtgtgtgtgcatatgtgtgcgtgtgtgtgtgtgtgagagagagagagagagacagagaaagacagagagagaaagagggagagagaaatgagagtgtgtggagaggtttaagagggagagaagaatgttcataccacagagacataaaataggaagatggaagatggggaaagggagaaaaggaagatttcaagataataaattatctgagtttgtaagtgtgtttttattttgtctttaagtattgcaaagtatctgaacaaaaagctgaggttcaattttacataatcaatatatactcagtagtcccagtatatcagtgtgaaaatgtgaagttattgtataaaaagcattccgttgtttttggtgctctaccaacacttagcacgtaggacagtgctctaacacatgtggtagaagaaaagacatcatactacaatgctagccaccacatacatcaaaatcgagttttcttttttttttttcttttgagatggagtctcgcttgccacccggctggagtgcagtggcatgatcttggctcactgcaacctccaactccctggttcaagcgattctcctgcctcagcctcctgagtagctgggattacaggcacacaccaccacagccagctaatttttgtatttttagtagagatggggtttcaccatgttggccaggatggtctcgatttcctgaccttgtgatccgcctgcctcggcctcccaaagtgctgggattacaggcgtgagccactacgcccggccaaaattgagttttcttttatcacttttaaagttctatgaaagttgacattgaaatttaatggaaaagcttcatattcatagactcacaaggctattggtggccttatgggctaggtcctctcagaggtcatttagttcattttcacattggcatctagagtggaaaaataatctagctcgcatgaagggtgcccccaaaggagacccacaactgctgttaccaattcttttgactgtctgaaaaaactctcctgacacaggaggcattttgaaaccatctccatttgcccatgtattcataatctaatataatataataaatagcacattctttttttattcatatttatttatttagttaattagtttagatttagagacagggtctatgctatgttggccaggctggagtgcagtggctattcataggcatgatcatggtacaccacagcttcaaactcctggccttaagcaatcttcccgccactctttcctgagtagctgggactacaggcacgtgccattgcactcagcttgacagtatgttcttataacacaactatttgaaatcaagttctaaagatgaatcatgatagaaagttgtttgaaaaaattgttccattttcttttagaacccaagaagaccttctactgatgatcacattcaaattttaaatgtctagtgactaagagactaatcacatggggctgcttagatttatcgaggaggacaggagtgccaaaactctaagttgttttttgtagggtgtaagaacaaaggcatctcatgtgtctcgagaaatgagtgaaagtcatgacccagttcttcctcctactttaacaaaatgtgactgaagaggaagccagatgtgttctaggacagaccagctgactaactcttactgtcaacatacactgtgcaattccaagacacaagggcaactgataaagaagattagcttggttttccagaaataagttctgctctgttcaatctccttgctcaatctccattctctcattcatgtggaataacaagatctgcaataaacaccaccaggcaagtctctgaggattactgagttatttcagaaattttctaatcttctactctgaacttttataaaatgattatcagaaaatgaatcagcagttggaagaataggaaatagattctactgtaatcatttcctgcaagtaataatttctcacacattatcataataaagtctctgttcttctttaagtagagtaagtcatcgaggaagtagatcacttctaaaaaattaaacttgtctctgggtctttataatatattataacattactgaatgattgctcttgaaatttccaatatttcatgtccttaacttgaattttccctacaggttgaaaagtcaggttctggaattggctgtctggattaaaatactggttccatcactgagaagctgtgtgaccttgcgaaaattacttaatctctttgtgtttcagttttctgatctgtaaaatgaagtcaataatggtgagaaaatgagaaaaatgcatgcaagcttagcatattattagagtgataaatgctaacaattataaatcatgtcagggcctctacattattttagcatttactttcctctgactatctgtacattactggataaaaatattttattgatcaccagatattaaactcctgtgaatttctgtgtgttgatggtgaagttggtgggaggatggtgatgagacttacttgaagacaggaatgtatgtgagttgaccatgtcagtaagctgagatactgtcaatttctgaaggattcctctggctgagtctacacagttaagaagtattatatatttcttgatgtctttcctaatgtctaactgaaattctctaattgtctcatgttttattcctcatttatggagatgctggacagcattaaaaaatattgaaacgtgaatacttgaaaacaattactgtatcatttgtcaattcttttaaaaaatatcaaaaacccagtttatttggccttttgttctagacttcaattctacttctttggaccccttctccctgaggctgatagggcagctggcccctgtgtgggtgttgatgaaacccagaccagtacatagtactcagttgggcatagtacattctaggcgctaagacaggcaggtaagtggatcaagcctttacaagcggtgacttctctcagggaggaaacagccctaatcttcatttaccaggttcagaatgctttgggtatggtatagtgatgaatttgatatcgttaccatataatcacaatcttgaaacatcacattttaacattcaaggaatatttgacattgccatttaaaaatattattcattcattcattcattcactcactcaacaaatatagcatgctaaaaacataaaagaagtatgctagattttttcgaatacaccttttggctctaactggattatgaatttcttttagagcagagacactgtaccttattcatatttctatcccaagggtcagcctgtagaagacactcacctaatgcaacaaacatgcattgcataaatgaaaaattggatgcaaggaatatgctagctgtgcatgaccaataaagcatttgttgctatgtctcatctttaaactttgaatttaagcagaacttgaatgcaaatactgtctccatgaaaaatatatttggcaacaatattatgttagacctttcacttagattaaatatataatttaagtgcttatataaaaaagaagatgaaatcaacaacctatataaactatccagggagtcaagggttttggtgaaaaaaaaaaaaaacagtttaaaataggacttttcttaaactcaaatcctctttcatgtagcaaaaggaaatgagcaaagaaatccaaacccactgaagttttcagggccaaacattttgattcaatatgctctgctataaaatatttggccttgtttgaatttttattgctatatgttctcagtctatatttaactgtgaggaacacaaataagaaagagtaaatgtgcagaacgttcatttcaagagcatggcagtgaatttgagaaaacatgtattaaaggaacactttgtgtttttaactttcagccccttttctgaggcctcccttggccagatatgattaaatatttatcaaactaaggactcagcttacttggagtgaaaactcttcagggcctctcagagatacctaagataagtaccttattttagtagctctcaaataaagcttcttttatgctctgtctttttcatatataaaataaggtctaattagaaagttttataatggaggcagtcaattccccaattccttatttgtttgaattaacttttaaaaaattggggtgttcactctggcgttggctcaatccagactctgtaatcagccaacaatctgtgcttcacaaaggctggcgtcctaactgccagcttctgccatccgcaccttttccgtggggtaatacattttaattggtacttctctgagagccctacacatctccatctggccaaataaacatacttttactattcagcctcaacatcttggcagttaacaagaggacagacttgccacaatgggtaatctttaagatgcataaaatcctaaaattaaaggaccaggtacaggtggtataatcaatggctgcctagaagatggctcatctacaaagtggctttgtgttccacagtctttttaacactgctcttgtgatcctaaatgcagttcctgagccgagtcagcattgagagctctctcctctcaaagggcacattagtgatgaaatatttcacttccaatgacagcataactttttggatataggcttattagcaacgtgtttccactggttggattgagcaagtgtaaccagaaggcagaatggtgaaatggttaagagcatgggttctagagtcaggctgcgttcaaattctgctgctgttaatttatctttgtgaccttgggcagttaccatacctctctgtgcctcagtttcctcatcagtaaagcagagataatgtcagtattttcctcataagagtattgcaaggactgattaaatgagataaggtgtctgatatgtttagcacagggcatgacttgtatttgctaacaattatttttaggcaaggtcagtagaccaaataacttgagcagcagaaaggaagtggaaggcgaataaccagctatgaggttatttctcagataatttcttcctatttcaatgcttcactttttacagtttaatcatcaagcaacagtgttagggattacgtgagataatatggtctgtgtgctgattcactcatttagtgtggtctcatttccttaaagaacacatcttgagagaacactttttttctctctaaccctcagggtcatctggatgaaatgaatacttttagggcaaaatggctgatactgcttccttgataaccacatataggtaagggattgtttctctgcctcccaaagttttccctttttcctacgaccactttggtgagacgcctttctcagcacaaagcagggacatgactctgtgcattattacaactggggatgtttatgcaagaggaaggccacctagaaaaatggagctgacagatccctgtaatttggggcacaaatggttcttagcagcaggtaagggtctctcaccagttgctttctcaggattgttgcacatgaagcattgccatgctcctgctgtttcactgaagccaaacacgtcaaagaacctcacttcttccagatggagctgtacctggtccagatcctgtgtcaggaacacaaagcacaaagaacataagctgctctgcctgctacctaacattctgagactgggagaaggggatgtggatcaggatggtcaatgctcaatctcagtactaaagactaagaggcagcattgaaaaaatttctcttggccaaccttaaaaaaagcattcagctaaacttttccagaagagtattcataaatgcagcgggagcgagcacaggccccagggctgagtgtcagggttgaggtgtcagagcttgaaatggcccagaattttcttgcatctagcagtggctccagattttctaaaaagaagggatatccaagtggcaatgtggttggaagacatgctgctgggggatttacatttatataaaattgagaaccaattatccatatcaaaaaatattattggccgggcgtggtgggtcatgcctgtaatcccaacactctgggaggctgaggcaggcagattgcctgaactcaggagttcaagaccagcctgggcaacatggcaaaacctcgtctctaccaaaaatacaaaaacattagccaggcatggtggtatatgcctgtggtcccagctactcaggaggctgaggtgagaggatcgcttgagcctgtgaggcggaggttgcagtgaggcaagattgcaccactgtactccagcccgggtgacagagtgagaccctgtctcaaaaaatatatatatatataatatttattatgttggctttacagggggctgatggaaaatatgggggtggggcttaatccctcagcccttggctccaggactgtttagttcttttgctttattctaaaagtgtatgcaaattttgcattctattacataatataagctacattgatttttttttaatttttacttttatttttttactgagatagagtctcactctgttgtccaggttggagtgcagtggtgtgatcttggcttactgcaaccttcacctcctgggttcaagtgattctcgtgtgtcagcctcctgagcagctgggtttacgggtgcctgccaccacacctggctaatttttgtatatctagtagagacagggttatgccgtgttggccaggctggtctccaactcctgatctcaagtgatccaccttccttggcctcccaaaaggctgggattgcaggcatgagccaccgtgcatggcctgcattggttttaatggaaaataatgcattgaattatttaccaataaattagttaacttttttcctccaagtggttgagtagaattgacactccaagaagactgcacatgttttatgtgccctgtggcaccatgccaatgagttcctctttaaggggcagggcagagaggttctgttagactgtaaatggatggaaaactattagcctaaccaaattaaatagctctactgtcctcctgaggctttcctcttatgtaaatgacttgtatcctttggtataggatggatgaccagaaactgcattcttaaaaggctcctcctcctaagagggacttaatgttcttattggccttgcatgtacccagccaactaacatgtttgtgctctgttgagctgtgattttatttcctttcctttagcctacacactcttatcttctctctgtataggaatagttcttagaattttcaaggctgaggcgtgtaggcactgtttgcactgcttataagggatctaaatagagaatgatcaagtggctatcctgattgcatcccaaagctcctaattctcagttctaaatttcttgacagaggtaagaagtatgtccaactatcagttcactgagaacagaaacatatttttttttttcataatacccccagagtccagtccagcatcattaatggattagcattggtttgtagacccagcacaaagttttttactaacgaactatataaaagatagtacaaaaagttaaagggaatttttaaagagaacatttacactccctggaacataaacacaatgaggacagatattttgtctgttgtgttggctgctataaacttggcacctgaaagtgcctatcacatagcaagcactaaacaaatatttgtgtaataacaaaaggcatgccctgggcctagaaatggatacttttccgcatcctctattaagactcttatggcttgtgttctggggttggacattttggaggtttgacatggtgactgcaacattttgggttgctaacctttaataccgtatctcaggcattccaataggtgctgtatatctaggaatattgttttgacaaaaatgattttgaatatgttcaatggaaaaaaagactttttttttaaaaagtatgttttccaagataaagactgaagaagcacctgggaattttgtgagtttcaaaggatacaatccatattaaaatttatggggaaaaagcagatgttcataagtatcagtttcaaaactgtgaagtctctgaagtctgtacttggccattgccatgcacattacttctctgtttcccacacaattaaggatcaatttttcattcaccacaaacactactagcaaacaaagtacttaaaataatacttaagggttcctttatttttcctgttctgagaccagaaaattcccagtttgttgcgcataatccacatttgtcttggaaaaaagtttaaacgtttcagacagatggtaaactaccttcctgcgttcaatttctgaagccaaaagcaggcttacctcctcagaggatttaggtgttgtgctaaaggatatccacggtagttgtatgaactttgaagttggtgataatagcacacttcgaatggaaagacagatgaaacacatatagtttccaatatttgtgaaaaatcaaagcaaaataaatcacaaaacaagcaaacacaaaccaacaaccagtgacacctagatttttggaattttgacctcttaaatgtgcttgaggtcagtagttctctctcctactcaaccttctttacccttctgggtcctgcagcttccctagggcttgcccaagaattgctatatggcttctatttttctaacaggagaacaaaaatagatttgtttagagaattacaaactttctttaagataactagactccagaaaagtgataaaaataacttatatctaactgtaagtcactgtctgagtatttttcagttctaatgggattgtggcagacagaccctaaggtgacctcccagtaattttcaccttgtggtgttcatctgtttgtatactcccattccctgtgtatgggaaggacttatgaattgcttctggccaagaatatgtcaaaggggataggatatcaattccgttgttattatacacaaacacacacacacacacacacacacacacacacacacacacacacaacctgtcttgctagcagatgcatagggagaccctcctgctgtgcttgaaggaaccaaattgccacattatgaactgcagggactatgcgtggcttttaggatcttaaaggaggccttcagctggtagccagtaagagttcaaagtcatcagtcctacaactgcaaaaaaatgattcttgccaacaaacagaatgagtttgaaagcagatcctacccatttgaacctccaaatgaaaacacagcctagccaataccttgactgtagccctgtgagaccctgaatggaggacccagctaagttacaactgaaatcctgacactctggtactgtgagataataagtatgtgttgttttaagttgctaggtttgtgctaatttgttacgcattattgaaaactaatactgagattgtgccgtgaagaggaagaaaaaatgacatccttttgcccaattctccatgaaagtgatgattctacttagaggagtcacattctcccaagtacactccaaatcaggcctcaataaaacatatacacacaaaataaaacacaaaagaatgttgaagttcaaactattttcattgatgtaaaaaaaaggatacatattcatagtaggcatgcactaataagggttttcctgataaacatcatttaattcaagaagattaaaactcactggaggaaaaaatagtatttttaaacatttggctaagtgagcatttctccggttttagaaaaagagtcattaatgagggtaggaatttggaaaactctataataagtctaagccaggcagcatagaaagatgagagatttacaacatcatttcactgacaaatgacagcatgagtcaacgcaatggattttgtaaaagtgcatagtggcctctggattttataatgtggtctatgtactttgagagggtactgtgaagcaattttccagaaatcagtgaaagcatacatctggaagaactttgggttttggcacatttaaattctgtcctaaagctatttgtgcacagatacaaaacataggattgccttatgtgcactgtgtgcctgtggttaataggatcactctaggcacatatttcaagtatgttttaagacatgtaagcaagtatttttaaaaattcccaaatattttcacataataataagtttatgtttgtatagttattttcagtgcacatactctaatgatatggagtacaaggtgtgaaataagcttgcttagggaatataattaatgattgatcttcatattgtcttaaattgttataggcatagtgtctagtaggaaatgctgtttgttgaataaataaacagcaaaagagactttaaagaatatccatgccacaatttttttatgtttttcaacttgtgaaaaatattactattggattcaatttatgtaacacagtattcatagcacctggtatcaggaaccatggataaagagatgaaagagacatagtcatcagtccaaggaggtgagaaggtaattcattgtgtctgcagtattcttcacagaggaaactgaatacagcttcatttgtgtgaggtgtgattgttactaagcttcttctggtgtgatgttttggctctcaactggattaaagctcttaccatgaagactgacttccatattgttttgcagcttttaaaaatacttagtatggcactttgcccatagtaaatgttcaatgaattattatgcatttttactaattgaagcacatagatcttatctctaatttatatcaacagtagcatttaggttttcagtgttcatgtctattcaactatgaccattaagactttccagactacatttgttaaaaaaatctatctctctctctatatatctatctctatatatctgcatatctatgggtattacaaaaattcattttatttaacaagtttttagaataaagtgttaataattgaacaatgatgtttgtcttaattcatcaatatagtatgttgactacttgttctcaagaccctcagctttttcagatcgtctgttcagagttctcgctatgttgcccaggctagtcttagatgcttgggctcaaacaatctttccacctcagcctcccagagtgctgtgattagaagtcctgagccactgcacgccatctacatttttacacaagctccccgagttgctctggtgtgccctgactgtaaaattaatcctatgtctttcaaagcagttgtggggatggctgatttgtgtccactgattggtatttgaggaatttgtcaatctccatgtgcatatgctcattcttttccacaatagtttggtttcaaggggtcaggtatggtggctcaaacctgtaatcccagcactttgagaggccaaggtgggtagatcacttgaggtcaggagttggagaccagcctggccagcccggtgaaacctcgtttctactaaaaatacaaaaattagctgggcgtggtggcaggcacctatcatcgtagctacttgggaggctgaggcacaagaattgtttgaatgtgggaggcagaggttgcagtgagctgagatctcaccactgcactgcagtctgggcaacagagtgagacctaaaaaaagaaaaaagaggccgggtgcagtggctcatgcctgtaatcccagcactttgggaggcggaggtgggtggatcacaaggtcaggagttcaagaccagatgatgaaaccccctctctactaaaaaaaaaaaaaaaaaaaaaaaattagccaggcacggtggcaagtgcctgtaatgccagctacttgggaggctgaggcaggagaatcgcttgagcccaggaggcggaggttgcggtgagctgagatcgcaccattgcactccagtctgggcaacaagagcaaaactccacctcaaaaaaaaaaaaaaaagaaaaaagaaaaaagtttcatttcatatgacaaaacaggtagactggtcacaagagcaaagctttcatttttaaacatcagagatgttattattccaaattgtgcaatacggcaagaagagatcaggtgtgaaaattgaactcattgggcccaatttgaaacttggcagaaggctggagtgggtggagagggaggtaggccatgggggagcagactctaagcagaggcagcagggcactgatgtggaaggactcatagtgcatttcagtattctgcatgaatgccatgcatgtgctatgtcccattggctctcatatttctatgcctaattagtaagggaactcgaggtacacatgactatatgaggccaatgtggcaaactcctcactatcactacatatcactaaataaacttatacttctatcctttgagtccctatgtgttgggaagaactgaatttcttcttggaaaatcatggcaattctatgtgtctggctccaagtggctggaagaaaacactatgtttgattcatttcagagagaagctctgaagaatactttaatttaagaacaaatatgacaaaataaaaaaaagccaaattcaccaaaatcacactcatctaaaaatcatgaaaaaataatctgactacaggatattggcagttaacatgacaagagtttaagtaaaacagtttgtgaaaaatttaatggaagtgtatgagttgagtagaaaataaaggtggcaaattgcatgaagctatataacaagttttataaatgtttgataaaaccacaattatcttttttacaaatacaatttctttgaaacttcagttcattaaaaccagcaaattattagagtgggagcaaggccaaaacactaccaatgttcaaaaggtcaagaaaactttaagatttttacagtggttcagcagtaaaatgtaatcacagaacttttggcaattatagccagcacttacatattctcctttcatagtgcaaagcaaagaattgcagtgatttttttttctaattgattactgccacctacattcaacaaatatttagtactacttgttaaatctatttgtggtactatactacagagaatgctgatgttaaagagctaatttggagaggctttttttccttccttttgaaatcagatagcaggaaaaccatgctcctaaccatgtaggttatttagttggagccaaggtgcttctctcattctcataattttattttttttcctttatccctaataccactttaattctcagactgtttctccaacttcccctttttataagtattcaccttttgggtttgacacatgtcttggaacagatacgtattcttgaaaaatacgtagcaatgtttatttttcatttttgcaaataatggtatgctgtgaaccctatttggtttcttgtttgtttcactcaagatctctatgtggtattctatgcatatttagctaactgttgcctctacagctgcacagtgatttaatggtgtgcatccaccacccccaacatttcacctaaccatttccttagtgtgggcaccaagggtgcccccatctctgaacttacacaatgatgtaatgatgaatattcttacacgtgttcccttgtggatgtgagcaaaaatttttctgtgataatcactcaggagtggaattgctgtgtcatagtgtattagtttagggctgtgaaaatatttttgtgtttctgcacagttagggctttttgaacaaattttactgaaacttgggacctgggctaaaaaaacaagctttagaagtaaatttatgactaattagaaagtgaaataccatctagagagatttattttcccagaggtatgtttacattttaagatggggatgagacccaggatataggagcttgggttgtcaagctggagacattagtcttcccttcaacctggaggggtttatttacattctaaagggtaaaagtaagaacccagaccccttcccaatgagcaaagatttttgttctctcctttcagggacagctgttccaccccctatgtaaatactcaaattcacattgtcaaggttccttgcctacagtacagaccctaggatgtgtaagatgacatctggttctcatcatgttgccccagggctaacaactgaggcaaaaggaaacttaggaggttatttgttgctaagtaaataatagtaatctgtgatgcccccagaaaccttgtttgcatgatacattaaaaatttaacattattcatatcctcaatttcactaggttctgccaacttgctattcaagctacccaggaggctgaggtagaaggatcacttaaacccaggagttcgtggaggcagtgagctatgatggcaccactgcactccattctgggcaacagagcaagaccctgtcttgaaaaaattaaaaaaaaaaaagaattatcattttgttgacatgtttactactttgtatagttacagaggaaataaaactgactctactatggacttagagagaaggtattacttcccatgatgctggaattttaaatgtctccatttagtcacttcacacagcagagagctggtgttggaggcagttttaagaaagttgaaccacccctcagtagagaactggataaagtaaactacggttggtcaggcacagtggctcatgcctgtaatcccagcatgttgggaggctgaggcaggcggatcacttgagctcaggagttggagaccagcctggccaacatggtgaaaccccatctctactaaatatttaaaaattagctggatgtgatggcacaggcctgtcgtcccagctacccaggaggctgaggctggagaatcgcttgaacctgggaggcagacgttgcagtgagccaagattaggtcactgcactctagcctgggcaacagagtgagactccatctcaaaaaaaaataaataaataaataaattatggtctatttacacagtggaaaattttatagatgctgaaatgaacgagctagctctacatgtatgaacagatatatttaaaaaacataacattaagtgcagaaatcacattgcaaaagatatgtgccatctgataacatttaggtaaaagtttaaaacaacagtacaaaagcattcatggaaataatacacaacaacctcaggagaatatttacaacagtttctttttgtaaagggagatatctgatgcaaatatggaagaaatgtaaacatctatctgtggcaggaatggatatcacatttctgtacttttctgaatttatgagctatttcataatttgatgaaaaataaaaatgaggcagagaacacagtttagtgaagcaaagagactagcaagggtcagactctgtgaggaagaaaggttctgcgtgtgtatgcgtgtgtgggcttccttggtacccctcaaactccctgtagaggagtctccttcttttgcctgtgttgagactgaccttggtggtgaaagtctttctcctttctcttgttagaaggctccatgttacagtttcttttaacttttagctcttcaaacttggagataaacaggtctaaagtactaagtgtttgaaatatgttctattttgtttcagaaaaccaaacaaaacaaagcatgctgacaccaagttctgtcttagagaattattacagcataggctaagtgacagagaggatacttagaaataaaagtttttctgctgagtggtacagaatgaagaatatagattttggagtcagaagatcagagtttgagccctgccactgccattcactggcagttcttgggaaaatattttaatttctctttgcttttaatgcactcctcaaactataaaatgactttgattcctaacctgtctctttcagtgactttttgccacaatcaattaatggataattgcactactttgtaaactgtggagaaataataaaaagtagtgataatggccaagcacagtggcttgcacctgtaatcccagcatattgggaggctgaggtgggcagattgcttgagctcaggaattttgagaccagcctgggcaacatagtgagaccccatctcaaaaaaaagcagtgatgatgataattcaaatcaagcaaaataagaagctcctttttatgtgtgtaaaatatagtgttttttgtctctcagctagataaatgtatgtaaatctttctgaaatgaatgacttctttaagaaacactaatgctaggtgcctgagaaacatatttagttttctaaaatcaggtaacatacttacctgtctgtttttgttagtttgttgtcaaacctaggagcgctggatttaatgagatgcaaacataaagagatgtaatgcgacgtggacatgaacatttcagaggggaataatgacatgtgcatgcttgatgaggccataatgtgatgtacaaatagaaaagcatagaaaaatgtgcatgggtaatggtgcaatgagatgcataaatagatgagtgtaatgataaagacatggggggtgtaatgtgatttacaaatgggagcattaaatgggagggtggaaagggcaggttgtggtagataagaagcagagagaaagaatgcagtactaagcatgaatggaggagctaatatgtgcatgatgaggatgtgatgagatagaaatgggatggcataaggcagttcacagatggaggggtgtaatgagttgtgtagaaaggagggaataatgacaagcataaaaggagggatttaatacgacgaagaaagaaataggcataagaagatgtgaagactgaaaggaggtgcagaaaaaagggacattagtgaagagacgggaaataacaaggtgggccaatggagcactctaatgaggctgaaataaaaaggtgcaatgaagtgtgtccattcagggaataattagacacacacacaggatgataatgaggtacccaggccctgatcagacatagaccatggcactcagttcttactgaggaggccaaaaattgaaaaaaattcagggcagaaccacaaagatatctacacacagaaaagggaagactaaacaggtgatttggtgccagccttgcagtttatgaaataatagttttatagctgcacttactctgttccaggtgctctgctaggtgttgaattaaatgcatcatctcattttaccttcttaacaaccctatgagggaggtggattctttcctagttatagatgaagaaatcaagctgtagtgaggttaatgacttgcccagttcccagagcatgtctgtggtagtgatgtcactcaaactaagtcagctggatctcagttgcctttgcctctgttttgatgttttatcagaagaggctgtgggacctcctgccccagaactaccaggataacttgtcaaagatctagagtcacaggattacccagtgaatattatttgcaaaatctgcagaggccctaagaatttgcatttttaacaagcgccccaaggacacttgcataaactaggtctgagaactactccatgaaactagcactagagtgtgtggtggtctaaggctactctcagtcctagtgaaagaccataaagaaaggagattgcatgcagcatgaggactttgggttggctacaaagtagactgtctgttggcagaagaaattaccagacccagaaatgaggcatcaaaccaaaaattatattgaatgaaggataaaaatataataatacatggaacataattagattctaggaaatagttttttttactgaattaaaaaaaacatagaaattactccatattcatggaatccctaagggggaaagggtaatatgtccctacaaccaacatttttccaatccacatgcaactttcaggattctaaaattaaaagctgatagtggcactgactgttctctttcttggtatgtctagtattgagatatctaaattgctatgatttttaaggtcgaaaccagaatttatattttgaaatagtgttaagtgtgcatgactactcgcattttagtgatacagcctctgctcaaaacctttttagatgtgtcttttggagttgtttgtggtgtatatttgtgagccatacaagaaaataatgctcattactttagtgaaacttagcttctaacatggaaatttattattcagtttgagcagtctctttttatagtacacatgggctcagataaatgttgggctatttgtgaaaataaaaatcattctcaaaaaatgaaacatggccaaacgcagtggctcgcacatacaatcccagacctttgggcagctgaggtgggtggatcacttgagtccaggagtttgagaccagcctgggcaacatgatgaaaccctgcctctacaaaaaaatacaaaaattagccaggtgtggtgttgggcgcctgtagtgccaactactagggaggctgaggtaagaggattgattgagcctgggaggtcgaggctgcagtgagacatcattgtgctactgcagtccaacctgggcaatagagtgaggccctgtctcaaaaaaaaaaaaaaaaaaaaagaaagaaagaaagaaacctttatcatgactgagaatataaagtctcaaaacatttactgagtagctgctctgcctcaggccatgatgccatgatagatgctgggacatgcagacattaatggaaagagcctgatcccacagcctatgagaggcacaaagacatcaaaatcaaacaattttgttgttgttgatgtctttatttacatttgtgaaagattatgggaatatggctgagggagtcattcattttgtttggaggggtcttgcagaggaggtgcaataaaatagtaccagctactgtttattgagctcttactatatggcaatcactgctccatggactttacatgtattatgtcttttgaatctcacgacatccctgcgaagtgtttactgctattttctgcactttgcaggtaaagaaggtaaggcacacaggagttagataaaagcgctggtaagtaggtggtagaggcaggattcaaacccagatcctgagtttctagttaccacactttcttcttgcacaaaaagaggtgctatttattctaatagtatagtgcctggtgtttgttggcattcacataatatccatgatagcagcaaaagaaaaaaaaaggattttactcatgcactgattatttaagaaaagaacccaaccactattagattagaacagacattgcagagggattgcatacctctgttcccccaggaatagagttatttcgttaactattttctaaaggtttttcctttttttaaaaaatttccttgactgatgcagaacatctggctaactgtgaaggaatgttcacgacagtagtaaaattgacatgcttcattataggacagtctggcttgtgaaatatgaaagaaatataatacatgtgataaaccaggatttcaactaaactgagaaaacatttctatgccaatttaaatttgttaaaaaagcatatgtatagtataagtacagtgtatgtggacagtggttagagagttacgaatagtgtatattaattagccaagagtaaaggtaataattttctaaaggagataagaggattaaaaagaaagagtaaaaaacaacagacaagtgtattacaatgaaaataaatgtttcttaatagtaaatagaactgtcagttaagttcaatgtatttacaaaatcatatgcaatcacttaatataatggattgtgtgtacagaattgtttaaatgaggggccctcatgtatatctgttaaggaaaagaaatgaatccaaatgaaggtagaaatagtatttagggaggcaaagtttagaatttggctgaacttccaaactcagtggtcctaaggcatcaataaaagtcatgcttgtgaaaagccatgccacttctctcaagaactcttcacatgtgaacctctcctcttatgttagccatattaatcccggatgaactatcgtggctctggtggaggagtgtgagtctactgatactacataaactgtgataaaaatccatcttttgcttaagctgaaaattctcccggtgttatctagcattgcaagccttatccacggagcatgctgtaaacatagccgtggtcagttaacttcatcttgccctagtggctattgtcctaaccttggccagttgcttggtgggtgtacttgttctgttttttgaaggcgaagagtagagtgtgtattggggctatgaggagaagcagagggttcttataaagagaaactcagcacaaatccatcattttcttcactcaggaaataacctttttttgttttgttttgttttttcctgggcctgtttcatcaatctcaacctctctattgcatcatcccggcaatttacaaacaggctctgaaggcttccattttcactcatctctacaatccccccacttaccaacccattcagcaccaaactgcttaaaacagctctctacatatgctatgtttccttctttactcgttccttcttgttcctccacctacttctgttcgtaccttgcccttaaaactctattaaaactgctctttccatgttgcccagttgaatggacacttatcttgatttggctatccagtcccatacaattcctttctttctccttcttggacactttcttgatatctgtgatgccctctacactttctgaggttcttttatttcttggctgccgtgtggatgcaatcctgaactgggaccatttcctctctaaactctcttcctagattgcttcagtcttcccatggttttcatcatctgtatgctgatgatgtcctaatctatattcctggcctaagtcacttcatatttggatatccaactgtctaaaagacaattccactgggacatctggcaggtgtttgaaacttcagattcggatgtctgaaagtcttgtgtgccagcttcattcacttgcccctccccagagctcattttctcccagttttatccaccttaataaatgataccaccatgccagaaacttgacatcagctttgattcctcatttcccctcacacttacatgccattcattagtttgttatgtcacttttacctccaaccgttatattgaatatgtcatttatttccatccctaccaggatcatccaagtttaagctactctcttctcttacctggattagcaatagtctcttttgtgatctccttaattttacttttgtccctttccaatctagtccccacacagcagactgagcaatcttttaaaaacaacctggttgcaatggactgaaggcttatgtccccctaccatcaccaaattcatacaccgaaatcctatcccccaaggtgataccattgggaggggaggcctttgggaggtattaagtcttggggatggagtcctcataaacgggattagtgccttattaaagaagcccaggagagatcacttgtcccttcaaccacgtgaggacacagcatttgggtgacatctgtaagccagaaagtgggcccgcactagacactgaatctgccttgatctcgggcttcccagcctccagaactgtaagaaacatttttgttgtttataagcacccagttaatagtattttgttatagcagcccaaatggacaaagaaactgaactaaggactgctgctcaaaactcctccgtggctttccatagaccacaaaaaaatctaagcttcttgccatggtctaaaaggccaggacagaattccccagattaactctccagtctccactctcccctttgttcactggctccaccaatgctgtgaaaggggagtgtgctcacttttgggtaggtgtgaccatccactgtgatacaggaggaagaaaatataactttcatttctatttatttttcatctcgtcctttaaaatttctatttttcaatgttttatagtgaaataacaagtatgtaaaataatgtatgtatatagtttaaaggtaaataaatgtgcacatattgaaggtacttgctcaaaaaaattttttgatgagatgtgtgacttacatttgaagagaatgctctaatacaccaaagcttttcctttctcttattcttccttttttgtttttgtttttttgtttcaaggcctttgtgcaaattgttctcattgccaggaaaacttgtctgacatctgctcagagaaggcttccttgaccatccaacaaatgctcattttctttaagcattatcttttacagtatctatcagtgtggaattgtgtatttgtttcttagtgtattgcttgtttccatcagggtagggatcatgattgtttgtttagtctctgcacagtggttggtatagagcaggcatttgcaaaaaatatttttgactgaatacatgaacttagagtcatatttaccatgattttgctgtgattattttgtctcctccgtgttatttctcatgccattctttctatatggaaccatttttctctttaaagataaaaaagcctccgaactctgtatttcaatttctaccactttccagccagctccctgcctgagcaaagagtgtcccagacatttgcctctgcatccacattccaccttcaatctgccctccaggtccttccatgatttgcagtcttcatttagttttccccttaagcactggattagccccttggtctggcttcttagggtagactctcattcacattttctgtttatctttttacctcaccattgccacttagaaactgcctgtcagattttcctggttctgagctcatagcctgaaagcctagaatcctccgcccccactggggttctgaaattccaaacccctttcccctctagcttgccctgaaaggaaggttctcttgaacatatattcatacggctcttctggagactgaccttccacagcacttgtcatttctatcacacatgtagacttaaatttctcatcttatattttttatatatatatatatacacacatactgttacatcttatatataataggcctaccttttatttacttacttatgcatttatatactcaagcacattaacactttaacccaaaacactagatctaagcctgtgggagcatcagaaagtctccttgggttccacccagaattagtgtttcagttttatttatgccttgacactcctgtcagttatcctgggaactatcaagtgtgtttgtagcaatgtggactgaaaacaaatcaccaaatgttagccagatggggcacattttacttcagcagaaaatgtagtttattttattttattttttctgtaagggacatagttttgagatcccatttctgcagcatacaacatttccctatgctttggtaactggaacacgtgttaataaaggccttttctttctgaaattctggccctttagtaatccttcaatcaactttgtcaactctctggtcctctgataatcagagtgccattccctctgaagtgttgggtagcacatgcactgaaacgaaattattaatagtaatctctacttgctccatggtggtctttctcatttcttcaataaatcaactgcttctccaccatctttctaaaatccttattttataatggaaattaattatcttagaatctatttttcttcaagtaaactgctcatttacataaggcaatataacttaaagtaatattttttccttgattataaaagaaatatatagagaaaagaaaatgctaatcccatcaactagagctatatcattaacattttattatatttccttttggttgatttaatgggcaatcctccaaataatattctttataaaagtaattttgtaccctgaaatatggtatttactgtaagtgtgtttcatatcattaaacatgtctcataaacatgacttttcaggattggttaatattttttgttctctcagcagagagagccaggaaatagttgtctctcactgtgtattgttatatctatctatctatctatctatctatctatcttcctatctctctatttcatctatctatctgtcttttttttttttttttttttttttttgagacggagtctcgctctgtcgcccaggctggagtgcagtggcgggatctcggctcactgcaagctccgcctcccgggttcacgccattctcctgcctcagcctcccaagtagctgggactacaggcgcccgccactacgcccggctaattttttgtatttttagtagagacggggtttcaccgtttttagccgggatggtctcgatctcctgacctcgtgatccgcccgcctcggcctcccaaagtgctgggattacaggcgtgagccaccgcgcccggcctctatctgtcttaaaaatattcttttacctggattcaggactagacctacaaaaaatattcttttatatggttgtataataatttcattctcctatctttagacatttaggctatttataaatccctctgcaatactttttgtgtttgtttatcttaagttttgtacatgtttcagattacttctttagaacagattcttagaagtggaatcactgtgtgaaaggatatgaatatttttaagactcttgaactgcattgctaaattgctttttagaaatgttgaaataatttacacttcaacttagaaacgtgtgagtgccttaactcttgctcaagccagcactgattattgtattttaaaaaatgtgttaaaaagggtaacttattttaactttgactactttgcctactaataaggctgaatatcttttacggactcagtctcctaagtatttgctcatgttcttcgttcattgattattgattttcatgaacttatagtagtagcttaaggatattaaactttgtttttcatgcttgttacaaatattttcatttaaaattattgtgcataaaaggttttgctctttacagactttatattttatgtagtcaaacctaccaattctttactctttgacattagttacaggttaaattaaatttaaaaaacaaagacagaaaagcatctacaaaagacactttaacaaatacccatgtacctgccagccagacttaacaaatgctaatattttgcttctggttatttaacaataaaattacagatgaaattgagatctccttaattcccttccccggtaacattttcctccttcctttcctcactttctccttacccaaaggcaacctcatcatgaattttgtataattctaaatatagtgtatttttatcataagtatatgtatgtataaataatgcataacactgcttggtgtgttttaaaaatttatacaataacatttatgctatcatagtattcatatcatagttttgcaacttgcttattaaaactcaatatcatattttcaagatttatcccatgctattacatataggtctaattaattcactttacctgcctgtataacatgactataccacaacgttttttttccacattcctctatcaagggacatttgggttgctcctgattttttgctgcaaaaaatgcttcagttagtatttctgtacatgttttctgatgcacatatgtaagagttcatctagaaatagaactgcagaaaaatagggcacatgaaattataatataaccactgattatattataaagagcagattgctctttaagaagtctgaaaatgaaaatttgtgggttttggttacatggatgaatgaagtctgagattttagtgcacccttcatctaaataatgtacactgtacccaatatgtagttttttagcttccaagtctccaatatccattataccactctgtacgcctttacatactcatagcttagctcccacttacaagtgagaaaatacagtatttggttttttatttctgacttacttcacttagaataatggcctcctgctccagccaagttgctgcaaaagacattattttgttctttttaatagctgagtagtattagcacattttatatactgtaatacaaaaaccttcttgtatttaagcatttttatgatcagctttaaatggaattaagacttcagaaataaagttactcacccatcttaacagtaatctagctgtcatttttgagtctaattaatgactatatatatatatatgttcttaagtgttcttttttctaaacaggtatacctattttccttccatcaagagtgtgtgaacattcccactttttcacatctttgccaagacttgtattgtcacatttttcttatcctggagctataaagataactttcgatattttcttctaattgttataagatttcattgattacatttaagcctttaatttatgtggagttaattgatctatatggtgtctgtgaaggatctacttttatcttttcagcttggaaaagttacatgtccttacattatttaaaacatattttactttctcttcgctgatttgtaatcccccttctatcacctaccaagctttcatatatgattgggactgtttctgggctctttattatttaccattaatttatccctgtggaaataatcacatgagttttctctttctgtaccataaaaatttcctcccccacagtctttcttaggattttgtttattctaaatttaggaccagtttgtcaaactccatgagaaaagtctgttgtcattaggattggttatgaaattgtaattacattttaatttgggagaaaattttcatttatatgataatggttgttcttgaccatgaaaagatcatatcttttcattaattcaggtctttaaaatttttttcattaatattaaaaaattttttatcattaaagagtttcacagcttttcttatatttattcctaggtcctttatagtctttactgctattatagatggcatgcttttctacattttctatttagttattactcacgtatagatttgttattgattttatatgttgatcttatatcaaataactttatggatcttttatataagttctaaaggttagattcttttgaactttccacacaaataatcttattgtctataaataatttctctttccctcatcctccctctcatctctatctctttctctttctggtttattcttttaatccttatacttaactgcttttgtctccctgcattgggtaggatcactgtaaaatgctaaattttgaaggtgatgacaggtatccttgtttaatttctaattatagcaaacacctttacattttttctgtatgtacaaaattagctctagggttttgatatcattctcttttatgtaggctttttaaaaaggattcgtttcatacgtagctaaacaattgtatatatacattaactgattatatgtatatatttgagttggtttctggactagtctgttccatttatctgcattaattctttccataaaagtggagtaatttaataattgtaggttttatagtgtgcttaaatgttttggaatgtccttttttttgcccctctcaaaaattttcaaactagtctcacctatttatccttctggctgtattttaccatcacttcataagagataaaaaataattctcttagaatttaaattggaactcagttaaagtgctaattaacttaggaagtattaacatttttgtcatatttgctatttccaatcaggaacgtggtaatatcactgttcattcaagtgtatttctctccattgctctgtgactttgagaaaattaatctttcttctacttagtttactcatttgtaagatgataataataatgctgtctatctcatagtgttgtcattgggattaagtgaactaattgatgttaaatgaacaggacaattagtggcacattctaaatgaccagtaaagttaattattattattaattctaatagtgttccttgtattttcatattaactaaaagtaatgttgaatttatcttcttatttcaaatagtatactccttatttctgtcttgtgttctatttgttgttgttgttattattattattattattaatgcctagtatgagccaggcatgctctttagatatcctggattctgtaacaaacaaggagacaagatccctgctctcatggagcttatattctcatgttggctcatgctttcaagcaatactaaattataaagattatagtggatattctggttttatttcagtattttaataaaaaatcttcagttgttcaccactaggcatagtttttcttttgttatcagacaaatatttatcatgctaagaacacatctttccatttctagttagtaatagtgctcactcactttgttcagtgaacacatatcactgagtgtcaacagtaagccaggcgatgctctaggtgctgggtgtacaatgacaagcatatgttctcatggaaacccagtctaattagtgacacagacattaataaaatttttatacaaaatgtgtgttagtaaagtgattgttggattttatcaaatgtcatttaagtgataatttttaaaaatttgaactattgaattcatgcattttactaagttcactaatattaaacttttatttttatatattaaaaatattttagcattatattacataagcatttccacattttgatgcctgtgtgagattgatatatagtttgcaaaagataattgattgaatttatttatttattattttattttatttatttatttttgagacagagtctcactctgtttcccaggctggagtgcagtggcgggatcttggctcactgcaatctccacctcctgggttccagcaattcttctgcctcagcctcccgagtagttgggattacaggaaggcaccaccatgcctggctaatatttgtatttttagtagagacggggtttccccatgttgactagactggtcttgaactcctgacctcaggtgatccgcctgcctcagcctcccaaagtgctaggattacaggcatgactgtacctggctgaatttactgcacctggctgaatttgattgaattttataatgaaaattcatgattgaaatttggaaaacgtttctggtaatgttggtctgatcaaagtagaaaagtacaataacttgagagattatcaatcaggttcatcttcctacctccactctcaacctcccttaatgtatgtaagacgggtttgaatttgtgttatttgaggtggggtgctggctagggattagaatattagctaacatttatttagagatcacaatgtgtggccactgttctgagagctctgtattaactcattcaagtctcaaaacagtgctatgaggtaggtactaatattatctccactgtacaagtaaagaaactggggcacagagacaaaggacacacagctggtaaggagcacagcagatcttaaagccaggtgattcagagccaacatgcttaactactctgataggtgtatgaatcaagaaaggcaggttacgctgctataactaacaccaaaatttcagtttctaacaaaacaacagatgtttctttctcatacaaaacgtgtggtgggactgggtggctctctagagcagaagccctccatgtggtggctcagaattccaggctgttttcatcttctggcaactcaatttcaacttttgctcctacaatcatcatcatcatggtagaggaaaagagaaattgcagagaatagtacactggcttttaaaagattcctcttggagtgacacatatcccctcccatatttcattggctgaagcaagtcacatggccagccttgcttcagtagacagggaaatgtgatcctctcctgggcccagaggagggaagtaccggattcatttgtgacaaccctgatatcgcaagggtatgtgtatcagttctagttccgccactgaccttcaacaagttcctttgcttccgattttaacatccagaaaatgatagaatttttaaacttcttcaattgatatgtattatttagagagcctagtgtgtgccaagcaccttgtagctctggcaacacaatggtcaatacagcaaaatccctgccctcaagcagtttgcaatttaatagatatctcactgataatttttagttctaaaattccaagattctattaaaaagcaaccacaataacaaacttctcttcatattgtccagaatgttatattctagatactcaggcattaggagtttcttccttctttcttgtgtgcatttcgctgcagtgaaactccgtcactgcagccgatacacacatggccatctctttcaaatcactaatgtatgtctatatggcacctattatgaaaataaagcagactttgcaccattcttacagctattttgaatttagtacagagaacatttcaaaaaaatcggaaaaaatctacttgagaaatacttgggcagataaatttgccacataatgtacattgcagatatcaaagttttttctattactcatgaacaaaccaaattataaaactttaaaaaattttatattttgtttacagttaattttcccttagagaaatgtttattagcatgaaacacaagaaatgtgaataagtatacttgtgagtatgcacaaaactagtttgccaagtatttttttttaatctcttaggatttgaagcagcctgccaggttttaatttactggttgcctctagttaaaatacagttagcaataaaaaatttatgagaacttgaggcattgtcttcaaatatgatgcaacagttgaaaatttgaatgaaatgtacaaagaattccattttactctacactgaggcaattgtggcatttcctttatttttaatactgcatgttgaattcctaaacacaagccaaaaagtagtgatgcaatcgtttcatatgtctttagtgtcttacagagcattacaaataaacttctgataaatcatgctcatttttcatattattagaattcttcatcatttaaaaatattatgttagtttcacaagagaccagttctggagtacttaatttgctactcatttgtattatgaatttgtttaatattggcatgcttgtctcccttttcaacagtaaaacaaggacagacaccatgatcatttattctcagaacatctggtttgctcagtaagcatccaatacttattactgggctatctaaaaggcaaaataagaataatcagaatattcgagtttgggaagggctaaaagagagaagctgataatatttactagaagagattaataaccattcttttctctcaatgtacatatttcccttgagcaatccagtcttctgccatgacagtaagtgctagcttgtgactcccaaatccatatctccagtcatggctttcttcctgaagcccacattggtatttaaccaccaccaccaccacctagttagccatataaacagcttggatttgaaatatgtaaaccagaatgctttatcttcttctgctccatcagattattttgtgatttctcattttcagagtgatattatcatccagttagccaaacaatgcacctggagtcatcctggattcttctatttttcttatcaggctgtcagtcctgttgatttgactttcttaatagctctccaatcttcctataacttctaactttagttcaagccttctttcttagtcactgtgcttctataacaaatacctgagactgggtaatttataaataatggaaacttattttttatagttctggagctaggaagaccaagatcaaggagtagtggaactacaggcatgtgctactatgcctggctaattaaaaaaaaacattttttttttttttttttttttgagatggagtctcgctctgtcgcccaggctggagtgcagtggcgcgatctcggctcactgcaagctccgcctcccgggttcacgccattctcctgcctcagcctcccgagtagctgggactacaggcgcccgctaccacgcccggctaattttttgtatttttagtagagacggggtttcaccgtgttagccaggatgctctcgatctcctgacctcgtgatccgcccgcctcggcctcccaaagtgctgggattacaggcatgagccaccgtgcccggccaacattttttttttaagatggagtcttgccatgatgttcaggctaatctggaactactggcctcatattatcctcctgcctcaacctcctgagtagctgggattacagataaaagtcaccacacccagctgtaaaatcttttctatttcatactatgcatgcagttattgtgtggttctaggaaactgtattgtgtcagtatacagacctcaaagggcaatgtccttgtttactggtaccactctattctgaatctactataccacgtgaaaataatttcttacaagtgttttatgataataataaaagaaaggtaaacgaaagaaggatgaaatttaattgctaaaaaaaagggaaactgtttcaagacaatcttaaatcttggcctgtaacatggccaaggaaaggaatatttaccttctgctgtggaaacgtggactccatcatggcagtttcaaagctgtgagcaccccctgcctgggtcttctcccacagagctctgaggaattgcacagaatgactctgaatggacaggggttcaggaaacaggctctgaaagggcattaaagacagaaacagaatatactatgtcttgtcccaatagtattgtttgattgatttcaaggcactgtttaggcttggtttgaactttaacatgatttaattttaaatgaaacaagaaaaagatctgtcttaaagatcgaacatatggggttgggcatgatgaatgagcctgtattcccagcactttgggatactgaggcgggaggatcgcttgagaccaggaatttgagaccagcctggccaatataacaagacctccacctctcttaaaaaaattaaacgaggccgagcatggtggctcatgtctgtaatcccagcactttgggaggctgaggtgggtggatcacgaggtcaggagatcgaggccatcctggctaacatagtgaaaccccgtctctactaaaaataaaaaaaaattagccgggcgtggtggcgggagcctgtagtcccagctactcgggaggctgaggcaggagaattgcttgaagccgggaggcagaagttgcagtgagccgagatcatgccactgcactccagcctgggtgacagagggaggatccgtcaaaaaaaaaaaaaaaaaaaaaaaaaaaaaaaaattaaacgaaaaagatcaaacatatgatatatttcaggattttcattttttaacagaaatttaaaattatttcatagtattttcaaggcagttgataatgatctccataaatatgcctaacctttgtaatatagtgtttatctcagtgatttcccaaggatgttctttaactggaacatggttaatataaatattcatatttattttctcaaagatctgggaattaaagaataaaattcaaatagagtacaaaaatcaagtctatttatacagagtagatcattaagaatagaaattaaataagttcattatgaaattaatcaaatatgaacagtatgagtgggtgtgtgggggacacaaaaacagttttaattctaaaatgtataatagatgaatattcttaaaactttaagataatttctctaaatgttgatcagtaagaatgtgaacataaagaaaatcacatttacatatatttcattcaagccaatgaaaataaacttttcaaaggaagattttaagttgtgtttgtatatttactaatcaatgatgtgtctaataatcatttacatgtgatagtgttatacctataaatgtaagaagcttttcaattcaaaggaacaattttaaaaaaatgtatagaacatctataaaggtataaaataccatttacctacatacaatgtgatataaaggatcctttatgtataatgtataataaaataatgagattggcttatgaaatcatatgttctttttatgtcaatgactgtctaagcactggtgtatgagactaagtggtttgtatgtacaaagcttctatttagtgaatgaagattaataaatactattccagaaaaattttattattatcaaaataaactatttctagtactgaatgggaaaagatggaggatcttaatgctcaagttagtgatccacagatttaaaaagtttaagagccagcaatagataaattacataacccataatgtgaatacatctgataaattattattataaaaaactgatgaagcacccaatttttcatttaaacaacagaacctgatttaatgaatcatcaatctaaacaggagcatttagactggaatctgtgaatttgggaactttataaatatatgtagttgacagaaaacggaaagaatttggcccaatgcacaagagtagtcaggttgtaattattaatatcaagtcaaagtttgatttttatttacccgaaagccagaattcaggcagaaaatgacacaatatcataagtgtggaaaaagaaagaaaccattaccgtaaaatgaacacagaagaaacatagcatacacagatactttttggtgattttgcttaaagagaaagacaaagaatcagacaaaatcaataaaataatactgaggggcaaaaaaacccatcaagatttcttgtttttttttcagaaaactgacaactgtttagaacaaagccaaagatgaaaccaaatataaaaccactgatgaaaactaagtgaaaaatataagcaaaatagaagaaaaataaggtcgttatttcaagaaaacgaaagacagtcaatgctgttctttgtattcacatacaatttggttcacaccaaaatgtgagttgttctctatgagatgttattaaatgttcctaagaagactcgctttagaaaaaaacagtattcctaaggcatgtccaatctgtctcttttcttaattgctatagttctactttattattataatgtattcagcattaaaattcattatttcccaataagcttgactttatcttataatgaaatacaactgtcttcttggtgatttttataggagatattatggaaatattttattaacagaagtaaataaagtgtcatatcatttggcttttcagccgtgttataacatttgcattttgttttttctgcctttaccctccctgcttctagctgcataaaataatgcattttaaaaataaaaatacattatttttcaacatatgtgtgacaataaaaagatcactgggtcaggggtcagacgatctgagttctgccctttcattttcttatctgtaaaaatgattcctaagattccttctattactaacattttataatctacattcaaattttatgtgaaagtttagtgcatccgagataactattttcaaataagaatctcttttgatgctaacatctatgcatcaaattcttcattctcaagttgtaagttgctctttacataatttcacctatgtacatatattctatagaaaaaagagacattccagtatcttaacaatgtcaaaaaggatatactgacactaacattaactggagattggaagactagacaaatcaaggctagaactacataagggaagctattctcccaaatacgctgtttttgctgttgtttaaccaaagatatcttccctttcattcttcttttttaaagctaaggatatttaagacattaatatgtttggctaactgattaataattccttcttttataaggaaactatcctaaaatataaaaaaccgaggttaaagttattaatgaaatatgtatgtattgctgttatctacatatcaactctggccaaagaataattcaataaaaatgattataagcccatatcccagaagctcattaaagagcctgatgaacacaaattatacaaacctgctgaaatagaaacatgatctggatccatggctgaggttcttggctgatgagaataaaactggacttactgtataggcagtaatgacccttcagggagcaggtgaagaacaactttgctacacaacttctcacagtgtctagaaacaaatacatatagcgttaaacgttatggtctttccagagttacactttatattgatacttcaacacacaaatgcctttataaaatatccttcagttttcaaactgtgagctaataactacaaacaactatatatttgagaggggatccatttcatggaaagtagatttaaataaagattttaaattattattattattgttttaattaacaatgtttgaagactcagcaactcccatggggggaaaaccctctcaccaataaaatgggagatactatatcattttcatctgatgggataccttgaagtgataacctgggaaaaataaacaaatggattaagaaaacccaggcattttctgggtagtaaatgacttgccatgaaccatggatgctgttctcttggttgtgcaggggcctcagagatagcttccaaaataactctggctgaggtgtagcttcctgtgaactgtactggtcgggtttgaaaaggtcatctcgccttgaaggatttcagctgggagtcttaatgagattatcctttagggacaaggaagtagtgggtgagtggtgtagaggtggtgaggcaccatgtgtagagaaagaaataatgaataaatgaatgaatgaagcaaatatgggttgagattctatgggctaggcactgtgttaagtactggataataaacattataattaattgacttccacatgtgttatgtgtttgacttcatttaattttaccctacaagatgggtattatttctgttataaagatgaggtaacagcacattagaaagccagtctagtgaaccactgtgactgtgttgttccctcttataaccttggcacatgagataaatattaatagatgactaatgtctggagagatgaatgatgaatgatgctcagagatccagaaaaaatggctcaagcctgctcaatctgtggcagagccaggattggaactcagcagggctgataccatgttggaatgttttaggcgctactatactggggatttttttaatctgtagagtcatactgatagttaatggggtattttttgtttcagaattaatctgacattttaagtgaaatgttttgaaaattaatagaggccaggcatggtggctcatgcctgtaatcccagctctttgagaagccaaggtgggcggattgcctcatctcaggggtttgaaaccagcccggacaacatggtgaaaccccttctctacaaaaaatacaaaaattagctgggcatggtggcatctgcctatagacccagctacttggggggcagagcaggaggtgggcttgagcccaggaggtggagtctgcagtgaggtgagatcatgccactgcactctagcctgggcaacagagaaatactccgtcccaaaaaaacaaaacaaaacaaaaaaaaaaagaaagaaagaaagaaagaatgaaagaaaaggaaagaaagaaagaaagaaaattaatagattcagtgatccagtatgccctactcttacaatggaaatggactagagttagttgaaagtcgatgagaaaagccaggcacagtggcacacacctgttaatactagctacttgggaggcaggagtgggagaatccctgagcccaggagttcaaggccatcttgggcaatatagtgagaccacgtctctaaaagcaaacaaacaaaataataaaagctgataaggatcctagtacgggcgacagagtcagtccccacctaagacagagtgttgttgaattctctagagaatgggggaggaagacttgtctgtgctctatcagaggtcaggtatgaaggaagtgacaggctttcaggaaaagtttgaaaaatcttagagcggccaatgagagattagaggagaaggtcttggaaaccaaacaataatgtgacagggcaagttagagatatatacagaaatgttaataattaatagctttctgtgattctgaaacattggtacagaagaggactagtttttgtgaaggtaattgtttcaggaaattaaaaagatttaagttgaacatacagtgttcttgtataaaatcagaaatcatgtctgtattctgtgggcgaatgaatcatgagatgtaaagagtgcttgaagcctcagtggacaagaccaggaggtctggcactgagaaagacctgggagaatagaatggagcataatatcaacttaaaattgccctatcagaaattgtttgacaatgatatactttttttaagttggcacatatgctcggaaaaattgaatttaatttatggtaaagaaataggaaacctattatctcaagagcacatacaaaaaatggtatttgaaataaatctaagtgtaacatatatattgagatagcaatatgttttgttttaatggaaagtttcaaaaggaaacaagttttcttttccaagaattcatgtagttagcttgagagttgtaagttggactttaggcctttatcatgaaaaaatagtttctgtctttttcctccctctaaatttttactgccaattcatgttttcttttgaaaataaacattgattagatttatttcactcactctgagcctaccagctttttatacacaacccacaggagtctcagatcacataaaatggtcaaagtagtataagagagagattcttaacttagaagcatatacactggctataaaaatacatcagttctgtgatataaggcttctgtgaatgctttcagtacatctggtctgtaccaatatttttatccttatttttttcagagctttcttggcttgcaaaattctccccatgacattaagacttagttgttaatttttcctgtatttccctcctgtttattccatagtatcaaacagcaggaatgcaataaattgttgttggatgaatgaatgaatggatgagtgtcagatatgtgttgagagcaataggggccatgatgatggtcctgctcttaagaagcttgcagccaaatgggagaaacatctgaacttacaacaatggttataagttgttttaagtttatgagataatggagggacacataataatgactgctcacagaaataagcaactcattctgactggggaacaaggggaggcttcatggagaaggagatatttgaggtatactttgaaaaatgatcaagattttgaacttaaagtgtgagagaaacaagcactttaggtgtagagaaccctgaaagcaatcacataaacataaatgtttaaggtaattccagatagtatgtttagtttatctcagtcattgaaatattacttatataattgtataattgatgccaaaaggattattcatttttctagactaaatgttgaagagagaagtcatgctgtcttaaatatagaatgctttccatattcaaccaaatctgagagtagtttctttatttttattggaatgtggcttctttttctaataatcaaaggatttggtttggtctttataaagactaaagttaacatgaacataagtaattatacaatataatgtgttatgtgttaaaataccaaatatattacacagataaataaatttaaagacatgatacaaaaatacaagaatatttggtcttctttgagtcaaaatctttaagaatcattttggaattctttgtttcttctgccactcctcctccacgatgccatttatatgccgttattcctgcaaggcattcactagacagtatctgagaaacacatcgttcttcttgggagactagacacttataacctatttctcaggtggccactcataacctatgccattatatatatatattttttggtttagagataagtgtcttaagattaaaaatggaatatggctttgattttttaatagctagtagaaatatcaaagaattggctttatgttttggaaaaaaagaataaattaggtctcattttgaattctttacaaaacttatcctttgaaatttccctcccagtgaaataaaggtcagataaatgtatctggcttatttcccagggtgttcaactgagcattgtagaaactgtatttctacaatgatttataaaagctcaaacacatgaatatgtttgctgaaactgccagactataagtatttacacactgaacatagcttataaataaacaacaaactcagagaagccattttgagagatttaggaaaggaactaattttcactgactccttactttgtacccagatgtaagtgtaaccaattacatttcatctttatgaagcaggctttgttatctccatcttactgaagaggaaatctcaagatcaaacttccaggaagcagctgagctgaaatttgaacccagatgccagagcctattctctttctagtacatgagtgaatggctcagataaaacagaggtaatagaagtacctcaaaaagaagtataattcaatagaaagagcattggctgaggattcggacagagttttatgggtagattgtgtttcttttcctctctgtccttgagtttcttatctttaaagtgggagcagaccaaaagctgatccagaatgaaacaaacaaacaaacaaacaaaaaaagctcatctacttaaatgatttttacattttaatttgcttattaactttctctcctagattgtgagctccatgagggtaatgattttttattgtggtaaattatataaaacatataatttatgttttacgttttatataatttaccactttatggataatatggtttaaaatttaaaccatttttaggtgcacaattcgctggcattaaatacattcacattgttgtgcaaacatcaccaccatccatctccagaactcttccatccttcctagttgaaaccctatacccattaaaccgtaactccccatcttcctctcccctgagcccctggcaaccagccactctattttctgtctttatgaatttgactactctaggtacctcatacaagtagaatcatataatagttgttcttttgttctggcttatttcacttagcataatatcttcaatgttcatacacatggtagcatgggtcagaatttcatttctttattaaagctgaattattttccattgtatgtatatgccatggtttgtttactcatttttctgttgatggacatttgggctgttcataccttttggctactgtgaataatgctactatgaacatgagtatggaaatatctctttgaggctctgatttaaattctttttggtatatacaaagaagtggcattgttggatcatatggtaattctatgtttagattttttgaggaaatttcgtattagaaatgaaatttttatctctgaaattctacaatttactaatggcctacagaggcctgtgaagaaatgtgtctgtgagggctgtccagagcagggctggacatttgctcagggctatgagggcttgcacttggcactcacgacaagctagatgacaacaggaggagttttcttctgcctacttgacactagcgtgacaggaacccttgaagcaatttccttcattttccatttaattcttctttattgtatttcaaagacaaaaaattcaaaacattgacgcaatgaataaataatactgtcatttaattgtatgaatgtcctaaattggacaggaaaaaaaagtagaagaaaatggaactggtaatttgtctgatgagagctttccaaaagtaggtaaaataaagtatgtttttgaagtcaaccataagttccaatttggggaaaaagtgcagaacaaactcattactttaaaataccattgcttttgactgaaaaaaatggaagaaggcatcacaagccagtgtggaccacttgtaaaactttgattccatgtgatttgtaaaatatattagtattttagactaaaactctattcctcctcacctccaagttaaagtttagaagttttgaatagaacagcaattatttcataactttgatggagtaaatagaagaaaagatattttaaggtaaaaacaaaattagattctcaaaaataataatgaatttgaaataactgtttgaaattacatcaaataattattcatgagtggacactgctttaatcatttgatgttttcagagctcggttctgtagaaggtgttcagaagtgtgagttgttgaactgacctgcactgaaggaaaaactgccaaatctctcatttgttgagaatctaggacacgtaggtaatggaaaagaggacttgcctagtgtttactaagttctatttacaacagtattagttgagaaatatgtgttccctttacagcagctggtgggcccctggctatatcacatgcatatgtgtgggacgtccctacccagagcaaaagtactatgctcatttccccattgtggcaaaaatccagccagttgtcaaatgggcatgttggatgcttttgttttgacttatccagagaataaaacaattcttttgcaagtgattactttaataacacaaatttggtaattatatattcagaaatatacaagccataggtgtacaaagacctatgctttgaccctgattttgaggaaaaaaataaaaattttgtattgttatgtgaaaacatatataaaagcataagaaaaggtctgtaaagttatagatcaaccatcgacagtgattactttcatattgagaagtgggagtggggtgaggagcatgcacattttacttcatatacttctgtattattttaattctctccttatcagtttatatttatgtattacttacataatttaaaaatatacaatgaaaaagtgctatttgttaaagcaggcaatttatttatctgtattttttgagacagaatctcactctgttgcccaggctggagtacagtggtgcaatctgagctcactgcaacctccacctcccaggttcaaggattctcctgtctcagcactccctgagtagctgggattacaggcatgcgccaccatgcctggctaatttttttgtagttttagtagagatggggtttcaccatgttggccaggctggtcttgaactcctgacctcaggtgatccgcccacctcagcctcccaaagttctgggattacaggcatgaaccactgtgcccatatttttaagttcaggggtacatgtgcaggatgtgcagatttgttacatgtggcatggtggtttgctgcagaggtcatcccatcacctaagtattaagcccagcatccactaactattcttcctgatgctctctctcctcctccccaccctccaacaggcctcagtatgtgttgcttccctctatgtgttctcataattcagctcctttttatacgtgagaacatgtggtgtttggtttcctgttcctgcattagtttgctgagggtaatggcctccagctccatccatgtccctgcaaaagacatgatcttgtttttttttttttatggccacatagtgttccatggtgtatatgtaccaaattttctttgtctagtctgtcactgatgggcatttaggttgattctgtctttgctattgtgaatagcgctgcaatgaacatacacgtgcatgtatatttttaatagaattatttatattcctttgggcatatacccagtaatgggtttgttgggtcatatggtatttctgcctctaggtctttgaggaattgccacactgtcttccacaatgggtgaattaatttacactcccaccaacagtgtaaaagcattcccttttctccacaacctcatcaggatctgttgttttattgactttctaataatagccattctgacttgtgtgagatggtatctaactgcggttttgatgtgcacttctctaatgatcagtgacattgagctttttttcatgtttgttggctgcatgtatgtcttcttttgagaagtggctgttcatgtcctttgcccactttttaatggagttgtttgtttttttttcttgtaaatttgtttaagttctttgtagaggctgaatattaggtctttgtcagatggatagattgcaaaaattttctcccattctgtagatcatctgttcactgtgatgatagtttcttttactgtgcagaagctctttagtttaattagatctcatttgtgaatttttgcttttgttgcaattgctttttgcatctttgccatgaaatctttgcctgtgcctatgtcctgaatggtcctgcctagattttcttctcgggttttgatagttttgggtttttcatttaagtctttaatccatcttgagttgatttttgtataaggtgtaaggaaggggtccagtttcaattttcgtcatatggccagccagttctcccagcaccatttattgaatagggaatcctttccccattgcttatttttgtcaggtttgtcaaagaccagatggttataggtgtgcagtcttatttctgggttctttattctgttctgttggtctgtatgtctgttcttgtacaagtaccatgctgtttgggttactgtagccttgtagtatagtttgaaattgggtgcctccagctttattcgttttacttagaattgtcttggctattcaggctcttctttggttccaggtgaattttaaaatagttttttctaattctgtgaagaatgtcaatggtagtttaatgggaatagcattgaatctataaattattttggacaatatggccattttcatgatattgatttttcctatccatgaccatggaatgtttttccatttctttgtgtcatctccgatttctttgagcagcagtttgtagttctccttgaagaggtccttcacttcccttgctagctgtattcctaggtattttattctttttgtggtaattgtgaatgggagttcattcatgatttggctcttggcttgcctgttgttggtgtataggaatgcaagtgatttttgagcactacttttgtatcctgggatttaagcaaacaatttaaatgatgtctcactaattaccatgtaacagggctaacatttatgattttaaatatgtttttcttttttgccttctgagtacatagcctttgcctgaatccagttaagtctccacctatctggctgtcgagtgatggtgggaatggtgatagagtagatattcaacagttataggagtaccaaaaaagtaaaatggaattaatttttttaactgccaaaattgggttatgcagcaagataatagccttgcaagtgaggcttttgtctcaagaaggaattttctaaatttccttacctccctttagcctatcattcctgaacatggaggatatacattgtaggacctgtagtatgaagagggtgacagcttggtcagttctatggttgttaggtaggagaatatagaatggaacaagtaaaagagaacaggttttagttctggcaaggaaaattatggagagaaggagagagacagagaagtgtaaagccatcagaagtgggtcctgacttccctcacatttgggctttggcctggagaaggagaagtatattagatacattatggtaacaccatgggcaatggtcaccgctgaagattcactcccaggtggccctcagcaccaacacagggtagccaacttaattaaaagcacagctcctgaagccagacagaaaggaatctctgaggttcagctttcatggtcactctttcctctgttatggagtagagtggagccagtagtagctgaggatcttgctggtcagcatttcagagaattcaccatagtgaggcaaggagtatggtgtggctctgcacagtagactgcagagagaattgtccaagccaggactcaagaggggcatctcacaccagtgggcactgagatgaggtcagattggcaagggagacccctggaccggcccatgtgtagagtgaaaaaaaaccattatccttcaggcaagaagacacaccacacccctatccagggacattaatgctttccaccaccacaagggagcaggagccacttcctaatgctcccagatgccaccttagggagataagcataggagagatgagagaaagaacatttttatccaaaggaaagattgtctcctaaagtaccattcaaatgagcagttgggattaactttaggcagggactcttaattttcttcctcactacccagtggttggttgctcttgatcagctctagacataatgatggcacattttctctgcaaatctaagttgtaatataaaataaattttataatattacaataagtgaaaaagtaatcatggagaataaaactatggtacagtgaagaagacgactcaggtggagaaagaaatcttgtcctaaagaatcagggaactttagaaacacttataagagtcacacagcaaagggtagaggatggggagtgagctgtaggaggacgttgagggtttgcatgtgagggcgaaatcaaataacacacagtggtatgtagtgtcccttggtgcatatagacttgcaaatttcttatatgaaaactgttaaaaacttgtgcctgcttgctgctttatgttactattaaagaacagagtacgacttgcccattaacctattcaaatcaggtgttgaagagccttggatgctctcacaagcaatgtttctgccctgagagagggaacaaagagcccttcctctcagaagccactctaaagccaacttctctgatcccttatccaaagttcaattcttctccaaggtggtggttaggaacacagattctggagcgagactttcctatttaccagctgtgtgtctttgggcaagttacataacctctctgtggctcaattgggaacactaataagagctcctatttctaagtgttgtttagggtgaccggccatcccgatttgcctgagattagagtggctcctgaaatgcaagtcttccagtgctgtcactaggaaagtgctggacaaagtggaatgagttagttatgtgagcataaagagttaattcatgtaaggctctcagacagacatgtgcttggcacagagcatgtgtttaataatgttcattatcatgatcactgttactgctactattgtatatggaaaaagaaaaaaaaaggatccctaggccaggtggaaatgtttgaatgttgctgtaatgctattttaattagaggaaagagactgcataatgacccttggcatctaggttgctcagtgtcctgaaatgttcacctaattgcttattttaaaatgaacttactacacagctaataatgatgtgtaagccaaaatcccattctatacaatgagaataaatttctctggggacagggcacaagtagaaggtccagcaagaaagaaaacctcataacaatgcatgaaaccatcacttgctctctgagcgtctccaaagtcctaggactgttaagatatgtgcaagtgagacttttgatgtacatgtcgttttgaggctcagaagcacagaaatgttgcaggaatgccaccaggaagctcaggaaaggcttgatattttgctctattcaaagcttcgtggcaggaagataaaaaaagctaacattaattgattagtttttaagtactgggcaatgttctaagagttttatgtgtgtattgccatttaatactcatgccaatgaagtagacacttccagttttgtggaagaatctgaggctcaaagatgtcaagtaatttatctaaggtcacatggctagcaactggcagtccagacaaatctagactgtttgactctagtgcccgttatactctgcagcttacataggttatgcttagatgaagcagcaattattagtccccccttttaagtcgaagagggatttaatttatacccatttatttttaatgatttaaatcttataaattatatatcactttcatttattctgtatgtagagacttgttgataatttgcttttggtatttattgcagtttttatctttatcgtataactgaatgagttatgtggcacattcccatccatgcccaaacctctcttgagagaagcccaagtgattgacccatcaaatcccagctcaagatattactgttttccagtgggaaccacctgaactgaaggcaacaggaatcgaagaacaactcaaggaaataaattgcctctgtcaggttagccatggaaaccagaacatctacagtaaaagcaaatgtcataatcataaaattatttttctataaattcatgctttacatgatagaggtcaatatatctttgaaatcttagtttcatttattgcttctttcaagttgtcttcatgtataacttatttcatttttatgtgacctaaaatccaatgatgatgacatcaatcatcataattaatattaaacagagttgcctttttttttttactatttctgattaattagttttactttcactttcttactgctgctcagatgaaaagtcataaaataatgactagtaatgttattcagcttccagaaactcaaccttctagcagtaaattggaaacagctggttatatattttgtcctattgaaggaaacagaaagatccatcgaaaaactaaagtaaaaatttaatagagttgaattacctctgcctcaactgactatttcccagtggtccacagggtagcatgaacttcgggatgagaaggcaacattaattcaacagaggctgtaggagtgtcttattgtccccagaacctctagaagctcagaaatttgccttgtggaggaattctgatgttaggtgtcagttcaaaatcttatgtcccagagctggaatggactttgagtggtggtctctcttttaatagacaggattgcaatggaatcaactcagaaagctcttcttttctttcaagtctttagatcccaaactcttaaaagcatgaagaagctcacagttcaattttccctattctttacatcataacaacttcactttgaaattaaataaagtgttttgagattagcaagacctctatagtcaatttttctgcttcactgagaaccctctcttgtgaaagggaatctggaaattagaaagtcaagatgaaggcatttatgacccagggcctgcttgaaaatagttgaaatacttaaaacccatctgcactgtatgatagcttattgctcaaaggaaatctcttagcagaaagctgttgagctgttgcccccaggagagggccttccacattcatgaacacgcaaccatctgagcagccacatagtaactgggattgttctgtatgaaaaaactgtatcataaaacacttcattattattgagtcctggactggacttctgggttgatagaagtagcagcaaatgggataaacaatgaagggtctttctcaggatttcgatggcaaaaaggcaaggggtagctcaagcactaagtttcagtaaggagcctaaaaagaccacgtgctccagctgtagggatcatggagccttgtcttgcttatgccagccctcgccacctatcaagagcagcaatctccttcccatggcaggttttgccccagccacatccagaaccaagggaggcaggcctggtggttaactgaggttccgaggccactatgttaacaggctggaaatagtctgggttgggaataaacaaagatggagatacataaacagtaagctatgggtcctcattcttctatcctggtgggacccaccccatccttttgttggaatagaagccacctctgaatcctacctagctgctgctagtgctctcctatccggagattggccctgtgcatggatatcctgtgttcacctgaatggatcttgctggatggatgaaacatgacttgcagccaagaactgcatctgtcctggagctcttgctgccctgaaaatttcatcccttcagataggatgctggggctcatctgcagggccattgctaacagccacacaggctttccaccacatgagtccaggagggacattattcccacaggccacagtgtaagtgataccgtctggagttcggcaatacagaagctctgtttatccaatgcaagtgagccacactcctaggacagtgtgatttgaggtggtatggtgatccttgggggagactgacattctattctagttagtctcttctcatacaacacttcttacccccattgcgtatgcctatgatattctttacttctttcagccccatgcatgccttgtggccaagactctgctttacgattcaaccaaacctcacttcacttactaaatctagcaccaggaatgaaagacagggagagcgggatatatttgagaaattggatttaactcttcttccaacagaagatgactgcagaggaccgcaggacacctctggccagggcaatagcctagcatagcacagtaaatttgcactgagagagaattacacttcttgcagctctttcatggtttgtgtatgttcaatgataatcaggcaaataaataataagataaatagaaatatggttgtacttgcagatttgaataacaatggtctgttctttaaggtctgaaactttatcaacattgttctgagagctgagagcacacttccattgtacataagctttattatcacaggacaaggtcagctcagcccacagtacaggggctaataggaaacaccatgctgctacacaacctgggctcaaatttcaggtctatctcaggtctgccagttatgtgatcttaagcaaattttgttttctatatttcagtttccactttcacaatttgggaatagtaatatgtaccttacagggtcaaataaaacatttaaaatactgcccagtacatggtgcttgcggctactgctggcatagaagggttaacccagaccattccataattacactaattgtatgtgtttatttgtggaggatatgctgcatattaagtatggagtttatcacagaatatgtagtcatatatttaaaacaaattcttattgcagtaaaatacatgtaacataaaatttaccattttgaccattttaaagtgtacagttcagtggcagtaagtacatttatgatgttgtacacctatcaccactatctagttctagaacttttccatcaccctaaatggaacccccacatctgttaagcaattattcttcatttcccctcctcctagctcttggcaaccaaaaatctgcattttgtctctatagatttgcctattctggatattttatataaatggaatcatataatgagtggccttctgtgtctggcttctttcacttattatgatgttttcaaggttcatccatgttgtagcatgcatcagtatttcattttttttgcatggctaaataacattccatcatatgaatatactacatttcatttgcctcctcattcattcatggacaattgagttgtttctaccttttggtcattgtgaatagtgcagctatgaacattcaagtacatgttttggtttgaacacttgttttcaattctttggagtatattcctaagagtggaattgttgggtggcatggcaattctgtgttcaacttgtaaggaatggtcatatattttaaaataattatttccttattcttacaatgtccaaacttaaaaataaaactgtcatattaattatgaaggaggtgaatctgaagagtgacatttgccatcacttttccagtcacctgattgtacacacagatgaggagcagtgcttacaaacaatactcaaatcaggatcatttctgattgggtggctgactgcttacaattacagaaaagtgttattgtggcaatgctgttcatatttttggattgatttcaatgttgtttctgatatttccaggaatttggccagtaatacttcccaaagtaggaataatgaaaaatataaattatgaaactaactgaaaattgaacttatctttaaatgactatattgatacttttagttctccagtgaatttttggtattccctaggaagaatgcaccttccaataagtgatgagtgtcactcagttctgggatgaggaatgttttgcagtgcttatccgatcacaaaatccgccaggggaagttcactcggaagacctcaactttttcctaccaggtactcttgatggttgccaaatacaagttagatgtccaaacattaagaatacaaagtagtcaatgtcaacatgatcagaaaggaatctgggatattttcagaggagttagcacagtttctagacatgaaagtaattttggaatttacatgaattttaaatcaaatacacacacatacctctctatatatttgcatgacactaatgtagttgatttctggcaacaatacagagccactttgtggtcacactgagtcagtggaagcccatatggtagaaataaacacttggctcttccaagcacagatttatcaaaagttgtacagaggcaaataaggcaggcaagccgtgatcccctgcaggtaccattccatgtgctaccaattactttgcaactctgcaaaatgcataacagtaaccagatatagggcacagaaaattttaggaaattctattaataaactccactaaaatgggtccgtttacatttttttttccccagaggaaggaaggataagcctaagatcatgtatatgtgagtcacccattgcattgctctctctggttggcagttctgaactaagaccttctgggctggccaccatcaggcatcagaagaacactcatgggagagttatatgtatttaccaggaggtttattatgtccgatatgttggtgcagggtatataggacctccacatagtgtatatcaactccacgtagtgtgtatcaaactcattgacgctcctgttagaagtggcctttagcaactactaactaagcctgactttcctaagatgccaaccgtctattccctgttgacttcatgatcatgtggctgacatgagaaagttagggggcattttatttcagtcactgctgctaaatgaggtgttactgaatagaaagcaactaattttgtgcagccaattctcgggatataccatgaatttgaaagccaattttagaaaataattctagtcttaaggaaattcagttcttcaggctacaggtaagactggaagcctctgaggaaggcattttcatgtggctaattgtactcttagagtacaagttctgaaaaatgttacagattacttgtcattaatgcagctgctgtaacaacatgaacagccattaagcttgaggaaggttgatttcatttgttatcctgcactggggaaatgtctaccagcatcaccatcattaacaaatactctgaggacttaccaaggatgagacattgggctgagtgttaaaactataaaaagattcagagttttacagcttaaaaaagagatgtcagaagtatatgaatatttaaaaagagcaatccatgatcaagtgccaaatgagaagtactgggaatcacgggggtgtagaaagtaagaaataggctagccctgatgaatgctaggcctagataaataaaatagcgggcacctagaggagcaagagtttgggtaaaggcatggaggtggggatgagaatggcatgtccgagaaggcagtgtgggataaagaagcagtggcaagatcatagagccagggccaagtcctgattctgccttctactggccatattaccttggacaggttattcgcctttctattttctcattcataaaatgaggacagtgctaactacactacagacttgtcaccaggattaaataaaataatttgttcacctttttaaaattatctatcaccttcatcaatattataatgctcagagtcaatgaaattatctccaaaaagctgctgtcaaaaagcccaaagtgtgttggcactgggaaattgggaggtgtttttttctttgacattctcaaatacagtagaccactgggcaacatagtaggaccacatctctatgaaaaaaaaaaaaatgctgggtgtagtggcctgtgcttgtagttccagctactttgggggctgcggtgggaggatggcttgagcctgagggttggggcttcagtgagccgtgtttgcatcactgcactccagcctgggcaacaaggaggccctatctcaaaaacaaagaacaaaaaacaactccccacaagaaggaaaggaatgtgcatgggataaggaaatgcaaatacagaaaactgagacaggaaaggagaacaacaaagagagggagaagacaggaagatttattatgaagaaaggtagtcaaatcaaaggaaagacaatcatggaatagtggtagtaaaaacccaagaagaccaaatgttttcccctttgaatacagcatataggatctgaatataaatagtgtctagtgtgggacagaagaaggaatagagtacaaaaagtgtccatctctacaaaaaagaaatcagtcaactatgcgtactttttttttctcatcaattctccaaatattctgctgggaaaaagatgggagttattggctccgagttagtgaagcctcttatatgtgactccagtgacccttgaagtttgcatctgttacaatcaagcacaccatttcctaacacactgcctttgtttgctggactcatgcagggcggtggagtgagtcactacatagcccactaggcaccatggctaccagcctccctctgcctgctgtttccttcctggaccgagaccctgacatgcaaatcagcatcgtagaatcctccttctggcatttcttgtcttctcattttctactccttccttacatgatagctcctcatcaatgagtactaagagtgactgaaaatactgcgaatatttcctttgggtcttagaaagcaggctagagggaaagggtttcagaatagcttaatagcagtaaaagcagtgaatgttaaactgctagttattgttggcactattcttgtctaagtcgtctgaataccaatatatttacagttagagttagggcccctttcccccaaaaccaattactttgagttttacagatgagctaagggtgccaactcagacagtgactgcatcagattataacctagcattactgaggaaccatttgctgcccctccaatgatgcttagaagacctcagcagaactggataaaatgcttcctatatggcacctctcttggaccacaatggtattacctgggcactgcttaccgctagttcagtgaacactcttgcatctgcttcactctgcccaacattgtgttgattcatctctgtctgctgtcttcttctccattcccctaagcgtataccttttatttcctttattatcatttaagtggggttttattgctagtagagataaacatgttcaatcagctatgtttaccagaagtctcgcatggaggatcagaaacccctacactccatctaacacaaaactccaggtgaatgtggaaaaatataatctagagcaagggttgataaactactgtccatgggcaaagtctgactcactgcttgcttgtttaaacaaagttttattggaacacagtcatagccatccatttatgaattatctatagttgttttcctactacaatggcagaattgagcagcttcaacagagaccacacaaactgtccaaaaatatttactacttggacttttatatgggaagtttgccagcctctgctctagaacgtaatttgattaacagtgaataatattgtaagacataatataaacatttttctgtattttaaacttgtttgaaaaatgctaaaatttttggaattattacgcttagttttagtgtcaaaggaaatgccataggcattttatatatttatatatgtatataaatttatgtatttatatataaagaaatatattttaccaagaaatggcaaaagaatatccttttaaataaaggtattaatctagatatcaaatatagcagtgcgataaatgttacttataaagagaaatctggcatttctttacatattaaattaagaaaatgttagttaacatgactgttgtttccagtgtttcaacaaaaatatttaatttaaaaggttatcctgataaaattttgtagcaaaggcagctataattgaacatagctagcttagatctttaaactgtacttctaaactattgcacatttttcaaacctaaattttcaccatcatgattaaaaagtgaagcatctttgaaaaaataatcttgctccataaggtcaaaatattttccaacacagaaaaaaattctggaaggaaatacatatcatttctaaaagtggtaaaatgataagattaaggatgactttctttagtttttttcctattttccaatattttacagggaacattatacttttataatcggggaaaaataccttcactagaatttttttccaccaggaaatggattagaattgagctgtgctgttataatagattcaattagcctttcaactgtcaccaagttattattgcagtgggctagccttctgagggataaaatgatcaactaagtttattttatacataaaaagattttaggtgatagcctcagagatgtaaaatactcagaaaataagaattgtgtctgaagatcattggatatagaaaaattggcagttaatttttttttcttcagttaccactctggtttgaagaataatatgaaatagcacctccccagaatagttattatgttctggggaggtctttaccaggtccattcctcaaccagggctttcctagatatgggtgggctggaggtggaagcagtggggacaagttacgtatcatccttcctcctgatatttttctacagataaaaatgaatgtgcaattaatgtctatgataaatagttcctataatgtgaatgctgattcaatttaggagtaaatgtactaagagcttttagaagaaagtcatatttttttggatgcttccctcatttaatcctcaaatatgcaacaaattagccattattatagattcaaaggttaaatctgtaaaccaaggccttgtctactggagtccatgttccaaaccacccctcctgatggactgactcctgcacttctctacctttatgaataactgtaataagctaatttatttaaaacattgaatattgctagcttagatctttaaattgtacttctaaactattccacatttttcaaacctaaattttccccatcatgattaaaaggtgaagcatcttggaaatcaattttcactaattctatgttttcttcaatgtatcaaatgtttgaaaataccatgcatgtactcccagcaaatggttaacatcttaactattctgtttctttttcaatgctgagattcagatatcatttatttgtggcagtctctgtgggttttcaaacttttatattgcatcataagacaattaacttttcctaataagggctgtcaccctaactataagtaaaaagtcacatgcaatattaaagtccacagaaagattgtgattcagtcacaagctcaagactgcacattgatggtatggacatctctattaagtcaggtgctgggcagacttgtcccttgctcctcatttgttgattcatttgtgaattcactgaactgcactgcactgtgttgagcacttgctttgtgcctagtgctgtgccagacactaggcatcaagaaggttcagagcctacagtgatattgcaaggatattgactcagaaccttggtgctgactgcttctattctcagttattgtggttagggttctccactctagttctggccctgggactccaacccaccctctgcacactctgagtaggtatcccatgaggtatgtgagataactgggttatttaagccagactcctaaaagtggaggttattggaaaaccaaacaaggcatctcaaattcaggctccaagggctgtttctgtcccacctggacctgagacccccacggcctgagaatattgttctagtgccctgggcttctgcttgtctagcattttaggggacaaggaaatattctgcaaaggtcatttatctgtgaaagcagtgacttatgacatgggaaggcctctgctggctgcaggggttggccctggccagatttgttgctgcatggatttctgtgccctggtcagccatccaccaaaggtggcaatcctgttcctcaccctgtgctgttgttgccaagcactgggccctgcactggacaagtagggcaaaggtagctgagggctccactgctcttatgatattgacccattcactggggacacctcaacctcacacttccctttgtactctcccgtgtctctaaatcctcatctgtctggagaacatcagacccttgtgtctggaggaaagtgatagagggtgggaacacaaaggaatgcactgctaatataaattatttcaggcttctgctcaagaaggtcgggtggcgaggttgtagaatttatattgaaaaagagaaggggaattcttcttagaccccttgactcactgattgtgcctaaaccccttcactgttttatggttgtggtattccaagccagccttacctaaagtgaaagagtcaagtgtcctgctcacatctttctgcatgaaacttgcccacaaccagctgattccgtgtcaagatatttttatttatatttaatttgttattacatctgagatggaaggaaagcagtatgactaaaaccagaaaaagattctttttccttcgaaagtcagtaaggtcgaaatcatatccaagatggccaaataggaacagctccagtctacagctcccagcgtgagcgacgcagaagacgggtgatttctgcatttccaactgaggtaccaggttcatctcactggggcttgtcagacagtggatgcaggacagtgggtgcagcccactgagtgtgagccaaagcagggtgagtcatcacctcacccgggaagtgcaaggggtcagggaattccctttcctaggcaagggaagctgtgacagacggcacctggaaaatcgggtcatgcccaccctaatactgcacttttccaacagtcttagcaaacggcacaccaggagattatatcccgcacctggctcagagggtcccatgcccatggagcctcgctcattgctagcacagcagtctgagatcaaactgcaaggcagcagtgaggctgggggaatcaatggcctgccattgatgaggcttgagtaggtaaacaaagcggccaggaagctcaaactgggtggagcccactgcagctcaagaaggcctacctgcctctgtagactccacctctggaggcagggcatagctgaacaaaagggagcagaaacttctgcaaacttaaatgtccctgtctgacagctttgaagagagtagtggttctcccagcacggagtttgagatctgagaatggtcagactgcctcctcaagtggatccctgacccctgagtagcctaactggaaggcaccccccagtaggggcagactgacagctcacacggccgggtacccctctgagacgaagcttccagaggaacattcaggcagcaacatttgctgttcagcaatattcgttgttctgcagcctctgctgctgatacctagacaaacagggtctggggtggacctccagcaaactccaacagacctgcagctgagagtcctgactgttagaaggaaaactaacaaacaggaaggacatccacaccaaaaccccgtctgtacatcaccatcatcaaagaccaaaggtagataaaaccacaaagatggggaaaaaaacagagcagaaaagctgaaaattctaaaaatcagagagcctctccccctccaaaggaacacagctcctcaccagcaatggaacaaagctggatggagaatgactttgacgagttgagagaagaaggcttcagatgatcaaacttctccgagctaaaggaggaagctcaaacccatagcaaagaagctaaaaaccttgaaaaaagattagacgaagggccaactagaataaccagtgtagagaagtccttaaatgacttgatggagctgaaaaccatggcatgagaactatatgacgaatgcacaagcttcagtagccgattcaatcaactggaagaaagggtatcagtgattgaagatcaaatcaatggaacgaagtgacaagagaagtttagagaaaaaagggtaaaaagaaacaaacaaagcctccaagaaatatgggactatgtgaaacgaccaaatctatgtctgattggtgtacctgaaagtgacggggagaatggaaccaagttggaaaacactcttcaggatattatccaggagaacttccccaacctaacaaggcaggccaacattcaaattcaggaaatacagagaacgtgacaaagatactcctcgagaagagcaactccaagacacataattgtcagattcaccaaagttgaaatgaaggaaaaaatgttaagggcagccagagagaaaggtcgggttacccacaaagggaagcccatcagactaacagctgatctctcggcagaaactctacaagccagaagagagtgggggccaatattcaacattcttaaagaaaagaattttcaacccagaatttcatatccagccaaactaaacttcataagtgaaggagaaataaaatcctttacagacaagcaaatgctgagagattttgtcaccaccaggcctgccctacaagagctcctgaaggaagcactaaacctggaaacaaacaactgctaccagccactgcaaaaacatgccaaattgtaaagaccatcgaggctaggaagaaactgcatcaactaacgagcaaaataaccagctaacatcataatgacaggatcaaattcacacataacaatactaaccttaaatgtaaatgggctaaatgttccaattaaaagacacagactggcaaattggataaagagtcaagacccatcagtgtgctgtattcaggaagcacatctcatgtgcagagacacacataggctcaaaataaagggatggaggaagatctaccaagcaaatggaaaacaaaaaaaaggcaggggttgcaatcctagtctctgataaaacagactttaaaccaacaaagatcaaaagagacaaaggaggccattacataatgctaaagggatcaattcaacaagaagagctaactatcctaaatatacatgcatccaatacatgagcactcaggttcataaagcaagtcctgagtgacctacaaatagacttagactcccacacaataataatgggacactttaacactccactgtcaacattagacagataaacgagacagaaagttaacaaggatatccaagaattgaactcagctctgcaccaagtggactaatagacatctacagaattctccaccccaaatccaacagaatatacattcttctcagaaccacatcacacttattccaaaattgaccacatagttggaagtaaagcactcctcagcaaatgtaaaagaacagaaattataacaaactgtctctcagaccacagtgcaatcaaactggaactcaggattatgaaactcactaaaaaccactcaacttcatggaaactgaacaacctgctcctgaatgactactgggtacacaacgaaatgaaggcagaaataaagatgttttttgaaaccaatgagaacaaagacatgacataccagaatctctgggacacatttaaagcagtgtgcagagggaaatttacagcacgaaatgcccacaagagaaagcaggaaagatctaaaattgacaccctaacatcacaattaaaagaactagagaagcaagagcaaatacattcaaaacctagcagaaggcaagaaataactaagatcagagcagaactgaaggagatagagacacaaaaaacccttcaaaaaatcaatgaatccaggagctggttttttgaaaagatcaacaaaattgatagaccactagcaagactaataaagaaaaaacagagaagaatcaaatagaagcaataaaaaatgataaaggggatatcatcaccaatcccacagaaatacaaactaccatcagagaatactataaacacctctacgcaaataaactagaaaatatagaagaaatggataaattcctggacacatacaccctcccaagactaaaccaggaaggagttgaatccctcaatagaccaataacaggctctgaaattgaggcaataattaatagcctaccaaccaaaaaaagtccaggaccagacggattcacagccgaattctaccagaggtacaaggaggagctggtaccattccttctgaaactattccaatcaatagaaaaagagggaatctgccctaactcattttatgaggccagcatcatcctgttaccaaagcctggcagagacacaacaaaaaaagagaattttagaccaatatccctgatgaacatcgacgcaaaaatcctcaataaaatactggcaaaccgaatccagcagcacatcaaaaagcttatccaccatgatcaagtgggtttcatccctgggatgcaaggctgattcaacatacgcaaatcaataaatgtaatccagaatataaacagaaccaatgacaaaaaccacatgattatctcaatagatgcagaaaaggccttcaacaaaattcaacagcccttcatgtgaaaaactctcaataaattaggtattgatgggacgtatctcaaaataataagagctatttatgacaaacccacagccaatagcatactgaatgggcaaaaactggaaacattccctttgaaaactggcacaagacagggatgctctctctcaccactcctatttaacatagtgttggaagttctggccagggcaatcaggcaggagaaagaaataaagggtattcaattaggaaaagaggaagtgaaattgtccctgtttgcagatgacatgattgtatatttagaaaaccccatcatctcagcccaaaatctccttaagctgataagcaacttcagcaaagtctcagcatacaaaatcaatgtgcaaaaatcacaagcattcttatacaccaataacagacaaacagagagccaaatcatgagtaaactcccattcacaattgcttcaaagagaataaaatacctaggaatccaacttacaagggatgtgaaggacctcttcaaggagaactacaaaccactgctcaacgaaataaaagaggatacaaacaaatggaacattccatgctcatggataggaagaatcaatatcatgaaaatggccatactgcccaaggtaatttatagatccagtgccatccccatcaagctaccaatgactttcttcacagaattggaaaaaactactttaaatttcatatggaaccaaaaaagagcccgcattgccaagacagtcctaagccaaaataacaaagctggaggcatcacgctacctgacttcaaacaatactacacggctacaataaccaaaacatcatggtactggtaccaaaacagagatatcgaccaacggaaaagaacagaaccctcagaaataatgccacacatctacaaccatctgatctttcacaaacctgacaaaaaccagaaatggggaaaggattcccctatttaataaatggtgctgggaaaactggctagccatgtgtagaaagctgaaactggatcccttccttacatcttatacaaaaattaattcaagatggattaaagatttaaatgttagacctaaaaccataaaaaccctagaagaaaacctaggcaataccattcaggacataggcaggggcaacgccttcatgtctaaaacaccaaaagcaatggcaacaaaagccaaaattgacaaatgggacctaaataaactaaagagtttctgcacagcaaaagaaactaccatcagagtgaacaggcaacctacaaaatgggagaaaatttttgcaatctactcatctgacaaagggctaatatccagaatctacaaagaactcaaacaaatttacaagaaaaaaacaaccccatcaaaatcaaaaagtgggcgaaggatatgaacagacacttctcaaaagaagacatttatgtagccaacagacacatggaaaaatgttcatcatcactggccatcagagaaaggcaaatcaaaaccacaatgagatatcatctcacaccagttagaatggcaataattaaaaagtcaggaaacaacacatgctggagaggatgtggagaaataggaacacttttacactgttgatgggactataaactagttcaaccattgtggaagtcagtgtggtgattcctcaaggatctagaactagaaataccatttgacccagccatcccattgctgggtatatacccaaaggattataaatcatgctgctataaagacacatgcacacgtatgttcattgcggcactattcacaatagcaaagacttggaaccaacccaaatgtccataaatgatatactggattaagaaaatgtggcatatatacaccatggaatactatgcagccataaaaaaggatgagttcatgtcctttgtagggacatggatgaagctggaaaccatcattctcagcaactatcccaaggacaaaaaaccaaacactgcgtgttctcactcataggtgggaattgaacaatgagaacacttggacacaggaaggggaacatcacacacccgggcctgtcgtggggtgggggaggggggagggatagcattaggagatatacctaatgtaaatgatgagttaatgggtgcagcacaccaacatggcacatgtatacataagtaacaaacctgcacgttgtacacatgtaccctagaacttaattaaaaaaaagtcagtaaggtcatcattatggcagtctgggtataggcctcttcttaatatctccaaagggcatttcttgataagatttctattatcagcaaaatatcttataggaatcagaagatcttacaaagtataccctggtagataaagcaaaaatgaatttgaaatatgtggattacatttccttaaaaatgtgcttgagttcaaaagttagcaatagtaatgcttaactaaaagcatttgggaatttcttaagccccaaatgtttgaaagaccagtttctaagttgaaattagatggcttctcttacccactaaggaattttaatttatattaaacatattcctagataatactttcactgaccagggatggtaatatgtcagtgttttacttcttgttttggaaatgtcctcatattttagtgccttaaatacttttttttttcttttgagacaagatctcacttcattgcccaggctggagtgtggtggtgcaatcacacttcactgcagcctcaacctcctggctcaagcaatcttcccacctcagcctcccaagtagctgggaccatcagcacgtgccaccatgactagctggattttttaaaaatttatttttggtagagacagggtctcttctgtgttgcccaagctgatctagagctcctgggctcaagctatcctattgcctcagcctcccaacatgctgagattacaggtgtgagccaccgtgcctagcctaaattttgaattaaatccttttatttatatagttattgaattgctttattatttgctgttgcaaataaattcaaaatacacaatagtccagggaatgcaaagttaaacataaaatttctagaaacaataacatcttaagcattcaatgtacatttgatacttgaattactaagaaactgtacaatagaaatactgtaggaatacaaaggatatctatatttgtcttgtttcttttacagtttgctcacctgtttataacagtttaaaaactgttaaaaaccaacaaaaaaaaaacccatggtgtacctgtaaatatgaactaatgtgactgtaaaataaaaattcagtagaaagacatgattgagacataggaatagtcttaactgtctacatttcctggggaaaaaactcatgtttatttaagcgtattcaaggttatttttcaaataaatagaagaaaatcatgtagattcagagagatgtagagagaagatggcccaaagtccaatgctaccagcgcctgctacatgaaacatgggccatcacacagctgaggtggagcaagagggctagtgagggatgcctggcactctttctcccaacaggagaggaccacagcaatggataaacagctaagatttgactggagtgtggaagggagagcaggcaagtgcagcgggggagtagagatgcacatgtggtgattggaagcccaggagggcagcgtggaggcaccaggcctctgcagccccctcttccttttatggattggatctgcctagaatcaggtgggacttcccatttccaggaaaaggtaagcagaagatccgcatcatcccctattgccaccaaaacacctacagtcctcactactggagaatcctacagtcctctcaaaccctaagcccagtttgtagaactgccaggaattcacatagctgcattgctctgattaggaacacaaagtgtatactctccatccgctacccaccctctgtgagccaagctgctgccgctgggcgccacgttgagaccagacatctctggagtgcgccctcctctgggggtcagtggccactgcacctgtcccacactgggggtccatcttcattccacctagccacagctgtgtggagcctgggctggggattcgctgtgattctggtcttgcgtagcagggaaaccacctcatgctctgcacttccagccaaaggaacagtgtggcaatcccgttcatggagaaccctgccttgagctgactaaaccactgtgtgcctgcccccaagcaggaggggcatgggggtgcagatggctcttcaatataataatttcctttccttaggataaatgcccagtagtgggattgctggatcgtatggtagttctatttgtagatattgagggacctccacactgttctctttagtggttatactagtttatattcccaacaacgtgtaagagtactcttttctctgcatcctcaccagcatttgttattttttttttctttttgataatagccactgtaactggggtgaggcaatacctcattgtggttttggtttgcatttctttgatgattagtgatgttgaacattttttatatacttgttggtcatatgtgtgtcttcttttgagaaatatctgttcagatcatttccccatttttaaatcagattgttagatcaacagtcctggaaatgggaagtccctcctgattctaggcagatccaatccataaaaggaagagggggctgcagaggcctggtgcctccacgctgccctcctgggcttccaatcaccacatgtgcatctctactcccctgctgcacttccgtgctctcccttccacactccagtcaaattttagctatttatccattgctgtggtcctctgaccccttgggccagcaggttggccacataggcacccacactcaaggtctgaaaaatggccctgcagcacccccttgcagccttcaccactgaattctactgaacctttaaagaagaattaataccaatttttctcaaaatacttcaaaaaaattaaagcagaggaaattattcctaactcattctgtgaggccagcatatccctgataccaaaaccagacaaggactcagcaagaaaataaaactacaagccattatcccagatgaacatagcactacaggccaatatccctgatgaagatagatggaaaaatcttcaataaaatctaacaaatcaaatctaacaacacctcaaaatgataatacaccatgattaagtgatatttattgcaggaatgcaaaatggttcaatatatgcaaatcaataaatgtcataaattatatcaatagaattaagaacaaaaaccagatgattatttcaatagatgcaggaaaaacatttgagaaaattcaatgtccgttcatgataaaaactctcaacaaactaggcatcaatggaacatacttcaaaataataaaagccatatatgacgaacccacagttaatgtcttactgaatggagaaaaactgaaagcattttctttaagaactggaacaggattaggatgcctactctccccaatcttattcaacctagtactggaagtcttagagcaaatgggtaagagaaagaaagaaagaaagggtatccacattggaaaggaggaagtcaaatagtcctctgtgcagatgacatgatcatatatatagaaaaacctaaagatgctaccaaaaaactctaagaattaataaatgaactcagtaaagttgcagaatacaaaaaaatcattagtgtttctatacacaaacaatgaattagctgaaaaagaaatcaagaaggcaatgcaatgtacaatagctattaatacaaaccaccaccacctacgaatcaatttaaccaaagaggtggaagacttctacaaggaaaactacaaaacactgatgaaagaaatttagggggatacaaacaaatggaaagacatcccatgctcatcagaagaattaatatcattaaaatgaccatactagccaaggcagtctacagattcaacggagtcaccatcaaaatgcctatgacattcttcacataaatagaaaaaaaatcctagactttgcatggaaccataaaagaccccaaatagccatagcaattctgggcaaaaagaacaaagctggagcatcacattaccagacttcaaaaaatactacaaagctgtagtaaccaaaacaacatggtactgtcatagaaacagacacgtagaccaatggaacagaatagagaacctagaaattaatccacatatctgcggccaattaatttttgacaaaatgccaagaaaactcattggaaaaaggatagtctcttcaataaatgatgctgcaaaaactggatatccatatgcagaagaatgaaactggactcctacctcttatcctatacaaaaatcaactcacaatgaatcaaagacctaagtgtaaaactggaaactatacaactactagaagaaaacataaggaaaatgcttcaaaacacttgtctggggaaagatgttatgaataagacttctaaagcacaggcaacaaaagcaaaaataaacaaatgggattatttcaaactaaaaagcttctgcacagcaaaggaaatcaatcaacagaatgaaaagacaacctacaaaataggaataaatatttgcaaactattcatacaacaggatattaacatcaagaatatacaaggaattcaaatatcttaacagcaaaaaaatctaacaatctgatttaaaaatggggaaatgatctgaacagatatttctcaaaagaagacatacatatgaccgacaaatatatgaaaaaatgttcaacatcactaatcatcaaagaaatgcaaaccaaaaccacaatgaggtattgcctcaccccagttacagtggctattatcaaaaagaaaaaaaataacaaatgctggtgaggatgcagagaaaagagtactcttacatgctgttcggaatacaaactagtacaaccagtatagagaacagtatggaggtccctcaatatctacaaatagaactaccatatgacacagcaatcccactactgggcatttatcctaaggaaaggaaattattatattgaagagacatttgcgcccccatgcttattgcagcactattcacaatagttaagatacggaatcaacccgggtcccccaaaacaaatgaatggataaagaaaaggtggtatatatggccaggtgaggtggctcatgcctgtaatcccatcactttgggaggccaaggtgggcagatcacctgaggtcaggagttcaagaccagcctggccaacatggtaaaaccccatttttaataaaaatacaaaaattagcctggagtggtagcgcacacctgtagtcccagctacttgggaagttgaggcaggagaatcgcttgaacattcacgaacatcacttgaacatccatgttggacaggctggtctcaaactcctggcctcaagcaatccacccgccttggcctcccaaagtgctgggattacaggcgtgagccaccgcacttggcccatctcctcaattaataggtgatcattaaatgaagagtccattaattcaatcacaaattcattgtcttttctctactactagtgtctactggaaattcttatttctgtagtagtgcttcttaccttcaatgtgttatgaaacacctggttggaggtggcagtcttgtggaactgtagatgctgattcaataggtctagggtaagccagagaatctgaatttctaacaagtacccaggtgatgttgatgttgttggtccatggaccatatttcaagaagcgaggatctgttgcagcgtttttcaaccattgctgatatttttggattaattctttgttttggggtggcgggctgacctgcgcattgtagtatatttagcagcattcctgggctgtatccactagaagtcagtagcacccactcccaagctgtgacaatgaaaaatgtccctagacattatcaaatgggggagacaaaattacctctggtttagaataattgctctattgttatgtttaatggttgtatgtttgttgcataatataaacacctattttgatgaactggctttagtgagaacagcattcatcagccaaataaacagctttcttcccctactcccaccagcacttagtacacttttatttatggacactgtagatttttaaaccaatattgttgccctccttactatgaccactagggtgctcagaagtaaatttcaaaccacatatagcaattgtgaatatttccagggataagtttctgaaaaataactcaactactggattcattttctttctctatgtttattttcccctctacattgagtaaaaattctttttgctttattatatatttttataggctgcttcacgtattgtttgaaatagataactttctattgagtaaggtgaacaaaactgttagaatagaaacagtcaggacagacacaatgcattaatttgctgatcatggttggttatgtgctgtttgatacatattaatgaataaatccaagcaaatagtgagacaaacctcacaactatgaacaatctggcttattttctcccaactgtagtaaactgatgaatgcagatgtctagagaaaggacaggaaattaatatgaaagaaaagttttgttttttactttacattggagatacaaaattagtaataaagttgtttgaggctgatagcaacaacaacaaaaaaaccttggctgaataactaatgttttatactttgccagctctgccataagacactagggattaattgcatttagagcataaaggaccttaaaagttatccagcccagtgtttttcaagtttctttaagctgtggaattcttggtttaaacattcttcaggaaggctagtgtgtgaagccagctacatcagggttgttctgtttgcagggcaggtaaagggaggaaaaaagggtctctggagcctctatagggagcagagcttgcaaacccatggctctgtaatatactcttgggataagtgtgaggaagtggtgaccaatgagatgaagtaacctgttcaaggaatcagaattgccctgcagcagaggtgggactggaacccaatttagataggacgctgggcatctggagttattacctagttccaagttacctgcatctctgttactgaagccaattattcttattaaaaatttccaaaccttgcagaaatatttacattaaaatgttcaaatttccccctccctctcgctttcttctctgcctgcacccccaatctgattatttttctttttatttttttgagacaggatctggttctgttgcccaggctggagtgcagtggcgcaatcttggctcaacctccacctcctgggctcaagtgattctcctatctcagcctcctgagaagctgcgaccagaggcatgccaccattcctagctaatttttggatattttaatagaggtggggttttgccattttgcgcaggctcttcttgaagtcctgagctcaggcgatctgcccaccttgtcctccaaagtgttgggattacagatgtgagccactgcactcagccccagtgtgattcttcagagaaaaacagtgatagctgcttgatgtgtatccttctagaagtttcccccctccctccaaatttgtacatacatacacatatatgtaaatccttttttttcctgggttttcttggctggctctatttttctctttatcatagcacttaacgctttgtaacatcctacatattttacttatttatcatttctattatttatcatacatcttttcccactagaacagcctccatggaggcaaggatatttgcctattttgatcactggtgtttcgcaagtccctggagtgtgctggcatgtagtaggcactcaaaaattttgtagaatgaatggatgaagaatgaacaagatgaagaagcagaacaggaaagatttttagggcagtgaaattactctgtttgaaactacaataacggacgcaggtcattatacatttgtcaaaacccataaaaggtacaataccaaagtaaacctcagtgtaaactatggactctagatgataatgtatcactatgagttcatcgattgcaccaatgtgtcgctgtggtgagggatgctgacagtgggggaagttgtgtgtgtagtggggcacaggaggtaaatgggaattctctatactttccactcaattttgctgtgaacctaaaacttctctaaaaagtaaagtttattaattaaaaaaaaaagaatgagtggtcatctcaaaattcatgtgtctaaaaccaagctcttgatttgtatctccccacacattcttcctctagtcttatctgtctcatccatccattgggtgattaggcccaacccaccagcactgctgacagctttcctttgaaatatatctggagtgaacacttctcaccacctgtagtccaaccaccctaatctagggtgccacacataaagtgtccttctgcctcatggctttgtatttactgttccgtccttgctgcttctccttattcatgtctccattgcaaaatcacttcagtagagagaccttcccctgttactctacctaaatagtaatcccattctttatcccccctccaacttgttttgtttcacagcatctgtcactatttggcattattctttctatatattttttgttcttggtccatatcatcccacagaataagttccaagaagggagagatttgcttttgtttgctgctatatcttcagtgcctagcaaaacttagggactcaaatttttgttgaatgaatgaatgaatctgctattcacctgtagaatagcatttgcttcctaaggagtctctagccccctctacagactaatctccacattgcaggtagggagatatgttttcaatctgacttttctctcaggatagagcccagatccctgcctacattgaactatcctcctcctcacttcacttcactgctccccagggggccaacttccagtccctggagtaggctgtgctccttctttccacaggacagacggttctcttcagctcccacacctctacttactcttcacatttctcaagagttccttctccagggaagctactttgacccccagattagggcagattccatgtgataggttctgacagaaccgtgttccttttctgcagataaatcatctcactttgtaactacgtattatgtaagttccaagaaagcagagtccatgtctattctgcacacagttgtatcccctgcctacagcagcgtgcctggtactgccaggttctcaagaagagttggctgatgaatgaatgaaggcataaatgagcatggcaatctctgctgttgccaggcaagtctccaaagcatatccagagaatgaacctttcaggcatcactaacaaatccctcaagtttgagagaccagggaactctaggggtggctggctaagtttctccctgcctggcccaacaccaggtgatttgagcacaaataccagctaagtagatgacaacattcttgtgcgttgaggcttagaaatctcactggggagacacagtcacctgtcattgtccctagccatgtaaggcattacttcccagattaatatttcttcaaacatctaaactgaagtgatcatctgtaaaaagtagtttttacttacatgtataaactacagggttttatatgagaaacagaatcacactctcagagtttctttgacagttttacatttcctgcatttgtggcttattttaatgccagtgtaatattttaatggctgcgggataattgatgtggatattttcatctgaaaaatgatgattttctgtaaagcaaattacctttaaaagtttgctgactctctcactcttttttttttttttttgagactgggtctctctttgtcacccaggctgaagggcagtggtgcagtcaccgctcactgcagcctcgacctcttggagtcaagcgattctctcacctcagcctcccaagcagctgggactacaagtgcacatcatggctggcttatttttgcatattttttgtagagaagcagtttcaccatactgcccaggctggccgtgaactcctgggctcaagcaactcacccacctcggctttccagtgttgggattatgggcatgagccaccacaccgggccaactgaatctttttataagaaaaacaaacaaacaacaacaacaaaaaaacaaaaccctgtgttttataatttttcaccagtccctaatgtgaacagggtaaaaatgtagacataggaattagctgtcttttactcagctctttttgcctcaatccaagtagactctgtcagctttggactcatctgctgtaaatatgcacctctctgaaaatgaactgtaacacagatcatttcctactaaattatcaaatacctggactctcaattgctaactatgtaattgcctatgattttggaaaaatatttaaaaatcctccgtcacctgaaatttgatggttgttgtggagcaaataggaggaaataatctaccctcctccacccccaccttttcctctgtcttatcaaaacccttcacccagcgatataatctcttttcagtttcctggctaccaactcttcatcaccaacagagctaaaaaatatggatttactctgtttactctgtttttaaatgagatttgatgacatccagggaccactctgtttccctacagggcatatactgccagtttcataatgaaagtaaatggaagaataacattcactttactgaaatttggtttgtggcaaactggattggaatgtactcttctgctggggactgtcaggggctcaggaccattttatactgcactgcatcccttggagtaaagacagtccccaaacaacaataatggatgactgataataatctctgagtataagcttccctcaaaaaagataaaagtactgactgtggatataagagtatattgctatatacccttctatcttaataataatacatttcaaaaatatatttaaaaatatgaaatatgccacagaaaacaactgcttttacaccacccacatctcctcatttttcttttaatgtggtgacttttagggtgagatatattgaaatatactcctgtgcattttcgctccatttatgtatttacttttgcctctatttgttagcaaggtccctttaaatctattagagacacacctaaggtggatactatattaggggaattaggcatttcaaggtttgagatgacagatttcattttcagtcagataactgctcctggatctccatacaaaatgtcctaagagtgtgcatgtgctcaaccaattttattttgcactgttttctagtcagatgaatattcatctcatctgtagataaataacaggttaactagacatgcagacaaacaacatactcctttgtccatctgcattgtaagaaactttttttttttttttgagatagagtcttgctctgttgcccaggctggagtgcagcagtgtgatctcggctcactgcaacctctgcctcccaggttcaagcgattctcctgcctcagcctcctgagtagctgggactgcaggcgcgtgctaccacgcctggctaatttttgtatttttagtagagatggggttttgccattttggccaggctagtctcgaactcctgacctcaggtgatccgcctgccttggcctcccaaagtgttgggattatgtaataggcatgagccactgcatccggccagaacacttttctttaattatttatttaaatgtgcaaaggaaaccaagctttttctttattttaaagaagagcttttaaaaatataattaatgagaaataaagttatgttatgtcttcttttggaagtttgcaacatgttaagtcatggatgcaagtaggtgacatccttcccagtgatttgttgttacacgcccgagtcttgcacctactcttggctgaggatgtacaagggcagtgttctgatgtcaactcattagagcagtttgcagagagtcttttcaaaaggatttgtaaatcttcatttcttcttgttatttggatgtgtttcacgggctgttgcagatgactgggattgggatatgtgtggtaggagaaagtaaagatagaaaccagtcgctgttatgtctgcctttgtcaactaaaattcactttttggagaggtgggagcaggtaagtaaggtaatccaagaaaagtcccaaagcaccaagaaaagtttgctagaaaagtattccctagtaagtgcccttctaacaggggcccaagagaccaccttaatgaatgaggctccaggaaatttggtaacattttcctatttgctgtttttctttctcaaattgtgtgaaaaagatttaaaattcttctctggctccaaattttacaacttcaattcatggataaattatcctaatcccatgattaaactaatccattaaaaaataaaaaagaaaccttccccagaagcattaagtggatgggcgtaatcaacatcccccagatgggaccaactggaccaggaggatgtgagcaccccacagtcacaccaacactgaggtggacttgactacatgcacattttcagtaaggaggctttatttgtcattaaccatgaaaacaatgcccactaattgatattaataattaatctcattttaagaaaaaaatcaacttatcactttgggaggccgagatgggcggatcacgaggtcaggagattgagaccatcctggtcaacatggtgaaaccccgtccctactaaaaatacaaaaattagctggctctagtggcgtgtgcctgtaatcccagctactcgggaggctgaggcaggagaatcacttcaaccagtgagtcagaagttgcagtgagccgagattgtgccacagcactccagcctggtgacagagtgagactccatctcaaaaaagaaaagaaaaaaacaaaaaagaaaaatcaacttgtgtgggtctataaagaaaggactacattaccagcttaaaaattagctttctataagtcagccttgctgatacactctacagatgggatgtattttcacccaatcaggaaatacttcaaagtaacattgataggttcttgtaagcttttatattattctttatagaacttcagttatgggccagatttccaaggatttattacaatatcatgtgtgtgtttttttgacctctaatcagctttgttcacataaatgaatgccaatgattcggatttttaaaatgccctttggcacatgaattcagttcctccagtcttgtaaataaatacaatcagccagtgatattagaccattgctctgcttatgaatacataactttaagtggttggtaaacctgcacaaatactagagacctacaaggctcagaagtgaattactgacctaggaataacaggctgtttcatatccaaaatgacactgccgacccaaacttaataagacctggggtttgacatttttttccagacacagtgatagattcttactgatctatttatactctattgcctgttcccagtgtgatcaatattatgcaacaatagatggctgactggagttatgaatgctatttgtgaccctgattcaactcataccgaattctgctatacagtgaccagtgaggttcctattcatttaacatagtttatactgaagtattatgtggaaccatatgaaattgatatttttatatgtcaaaacagtctaatgtcagttttttcatatggaccaacctaacatcaaaagaatttctttcaaaggttgttttgtcgtgttcctagcgtatggactttgtaacagcagtccaaaatttttcttaacactttgttgttatttcctgctggctatatgtccctttaactttaaatgtttcagaagtggtttttatgcttcttctctttgcttcttgactactatgcataattcatcaagaaagatcaaatatgttgcatttatataaaaaacacatcaaacataacacaattaagcctaaatcttttttaaataagattttaaggaaagaaaggtaatattgttgagcaatcttaggataacaagcaaaattgtgtcagccagatgactgctggtgtgtcactgaataatttacagtacttctgaagtaataacaatgtgtcccctgcaatcagcctgagctctttctcagcggatgtattaccagtgaatcatacaaatttttgatccttcacacatatctctgtgcaaggaattgcccaggaaattccgagagtatgaatgaattccaaaatgtcaactaaaaaaatacatactcagtcctaggttatctaggtcatccctggcaggaaacatcagtatcaaaagaaagtattctttttttttaagtacagatgatgaatttattcaacatttttgggaaaaaaaagcaaagttaactagttaattgtcaaactacggatgctttttgacttatgatggggttatgtccccataaccccattgtaagttgaaaatcttacatcaaaaatgcatttaatacacttaacctaccgaacatcatagcctagcctagcctaccttaaatgtgctcagaatacatacatttgtctacagttgggcaaaacaatctaacacaaagcctatataataaagctagttgttatgaagaattttgaatcaaaattcaaagtatggtttctactgaatgtatatggcttttgcacgattgtacagtcaaaaaatcataagccaaaccaccataaatcagggaccatctgtaattttaactcctaaaatagctcaaggcaataagaaatatcatttgtttttgacaagtagaagtttgaggtaaatctgcaggattttctcacacatttccacaagactaaaactcattgcatagtaaacctttaatgctttagatcaactttgaaaaatcccactattttacctttatctttgctattgactccctgtgtcaaactggggaattcacttaatctctcttatattaaattctccaacttgtgcaatagatacacagattattagcaaagtaggcaattgtaaagtgttgattttgatggaattttattgattttagctatttccaagccctggtatacttatctaatacttatatttgaatataagcaatcttttattgtcaccattaaaatggctttaaaagtcttaggaaggctaataaagttagtgcaaacacttttgaaagtgtcagattataacagacatgctaaataatattataatgttatcactaaacatttgaatccccctttccctttgttagcatgagaacacactctttcctctgatttgaagtgggaaaagggctagaaagtagaatatggaaaaaagggctcttctagtacctaaacctgatagccagtgggcagatgaatatgaattggatttgctattcttcaactatttttctttctggaggctgagctgtctggctttttctatgagggctgtagcctacaagatggcagatcatgccagagtgctagaaccatcacatagatctcaagggaagaacatggttgctgcctaagaattgttattgtaaagattatgagcctgagagtgccttaaagctatccagacttgttcaacccactactagaaaagtgagtctgccctagcactatggcattttaggacccgtgtctcaaacacatttcctttcctaggtccaggaaggactacggcacaaaatgtaaaggagtgtcagaaatatatagtaatcaagatatataatttttttagaattaaaattaatgcaaataatgtatgatgaacaaaatatcaaaattgtaattagggacaggattgatattactaattattccttttgccttacgttccactatgactcagtaagacactgttactgatcttgctgtcacttaaaattttactgagttttttaatttttttattttttttttgggtggggggacagagtcccactcaattgcccaggctggagtgcagtggtgcgatatcggctcactgcaacctccacctctcgggctcaagccattctcctgcctcagcctcccgagtagctaggattataagcgtcagccaccatggcctgctaatttctgtatttgcagtagagacggggtttcaccatgttggccaggctgctcttgaactcctgacctcaggcgatccacctgcctcagcctcccaaagtgcttggattacaggcatgagccactgcgcccagcctttactgagttttattggtgccaccctaatttgtgtgcctgaggaaggtcctggcccctgacatcctgtttaaaattttttatttttttactttgcccttcgttttctgactagctcaacctctcactggcttctttcttttaagccacctcctgactatggttgtgcccttttctttgtgtatggatggtcctgacataagatggttgaatttaccattttttgactttacaatggtgtgaaagtgatactcattcagtagaaaccatactttgagttcctatacaaccattctatttttcactttcagtacagcattcaataaattacatgagatattcaacagtttattataaaatatgctttgcgttaggtaattttgcctaatgtaggctagtgtcctaagtgttctgggcatgtttaacgtaagctaggctaagctgtaatgtttggtaaactaggtgcattttcaacttataatgggtttttggggacatagtctcatcctaagttgagcatcatcatctatactctaaactctaagaggtcaggaattgtatctgtttggtttatagctgaatcttgagtacttttaacacagtgcctggaacacagtagctgaatggaagctgatattcaatgttatgcatgactttcttgcatgattatgtggttgggaaatgtctctggcagaacccctaccccagagccggcttcagggtcacagacctctttccaggatttttgtgaattctggggacagggaaccagaaataatatatcttgaggtttgcaaaaatcaaagagtcagtggacttatgtgcacccaagtagattcaaatgggaatcaagatgatcaaccttttcttgggaaaaaaaaaaaaaaaactaacataatgtaaggtatttaaaaaaaatgatctattttgcaaaagatccagaaaagagtatgctaatttacctgatttgagctttttgtttatttgcagtgactcctgaagtttctcaggtttgggaagtacacaacacttaccttcaatggtacactgatcagggactggaatcttctttccaatttccatggcatatgctttcactttgctgaggtttttttttaagtgcaagtagagcttatcttggtattctataggacttgcagttgtctctggagtttcttcctgggagttttctttaacagtttctgacaaattctctgagtctatatgtataatatttgggtatgaaactgaagactcccccagctgtgatctctcagtgtctgtcttaaacggcagcttgtcatttccttggccaagtgggtctatttctgaaagagagatgctggctggtatgtctcccctgttttcatcttcgccgtcatctgaacccacaccctttgtgagcatagtgtggaaagccaaactttttgacctagagttcaaacaaagggaaagttaaagaagttgtgttaccattcactgacaaggaaaagaaataataataatattgggacaaaaagttacttcctctggagtgtgaaactattaacaggcctgataaatgtataccaccaataaatgatgtaataaaccaaacctttgaaaatctaagtcacctccaaaaacaaagtttaaaaatcaatttcatggcaaaactggctgcaaaatagtagacttacatatttttcatctttgtctacttttgcttttgatttttcatcagaaatcaagagacagtattttccatatggcatataagcaatagatttgttttccattcatagtacccatttaaaatagtgagtttctttggataatgagagcattgtggatgatatttcattcatgtaaggatggcactttgggtggcaatgggtaaaagatatataaaaaacaccccataacagagtgataacaaagctaatagcgaacatgaagtgtatgatttaaaaaacaaaccaaacgagttatacctgttaaatctaatgttttttctttcttctttagaaacttggcccagactatatcttctgatagagccaggggtattgctccctgcatttatcttgtcttcaaaagcctggattttaacttggagtttttcatggtcttcattttcagttactatgagcttggtttcttccagtttctcagggaattcaatttcagtgctgatttttctcctaaaggaatataaatcattgcattagatgcaggtcatatatactcttcagaacagtgttattctctatttaactgcctctcactcagaagcaaaagctttgcctgataatttttttcattggtcatttaacaagtatttactgcaggcataggtctttgaaattgcttctacagcttgttctgccagaaatttagaaacagtggtgtttatgtgaactttgtattaaaaatgctttttaagagttcaaagaataaaaagcagtttttatgctcatgtaccatattcttttttagaaattcttcaaatgtatgtctttcacatgaaatgtgtgccagatattttctaaaaaatttacatgtgctgatatgtttgtactgaaattacagaataagaacatttcacatgcactgtataaactcatggttttgttaatttttaaaaaatcagtataactcttataccttccaaggagaaatatctttctgaattttaagatgttggaagaaagaggttttctgtgaacgatattaatatagacccaaatatcttttatagtagagtttataaaccactttgtgggtcattaaaattacttcctttaaagcaggggccatgtgtggtataattttggatttcctctgagggctaacagtgccttagctagaataagcacctacaaataagctgcagaaatagctttctgatgttcactgaggtgctgagtaattataggaaagtagcatgcatttatcttcccttatttatcttctaatactgagctggcctacagctactttaatttttattcaacaaccactatccatttttataacgtatggtgttagtattaattcttttcttaaaaaacaaggataaaaggaattatttttacttaccacacttttgacacccaatatgtgggtttttttctcataccaactaattctccaaccctctagacaccaactgggtgtcctacagttcaattcaatcctaacactaacgacctggaattagccccagactccacagatggcccccagttcagatgccagtgagaagtatggggtccccagcttacacttctgttcaacttggctacaaaggttcctgcaccaccccacccccatggttcaataattcactggaatgactcataggactcaggaaaacactttaacttattattattgggtttattataaaggatacaactcagaaacaccccagtagaagagatgcatagggcaaggtatgggagaaggggcacagagcttctgtgccctttctgggtacgctgtactcccagcaactcaatgtgttcaccaatctggaagttcttggaattttaggggttattatgacggtttcattattcaggcatgattgattaaatgattaccattggcggttaactcgatcttcagcccctctcccctccccagagactggggttgggtgagttatagggtaagatagagaatggggctgaaagttccaacagtgtaatcatgccttggtccttcctgtgaccagacccaatcctcaagaaatctaggggtccctgccaacagtcatctcattagcatataaaagacacccatcaatctgagattctgagggtttaggagctgtatgccatgaactcgggacagagacaaagtatttattttttattacagtatataataatccctagaaatatattcaccaagatggtctaatgattttgttggtttgtctgtgtgcatttacttggctgtctttagtatttttccaagacattgaggaaagggcccagacttagagaaaaatcttggctttttcaaacattatttttccctaagggccaaagtgaacctggcataatacctgaatgagagtgagaggaaaaacatccttaaaaaaacaagaaagaaaaagaaagaaagaaagcactgccaggcacggtggcttatgcttgtaatcccaacactttgggaggccgaggtgggtggatcatttgaggtcaggagtttgagaccagcctgctcaacatggtgaaaccctgtctctactaaaaatacaaaaattagctgggtgtggtgtcaggcacctgtaatcccagctactcgggaggctgaggcgggagaatcaattgaacctgggaggcagaggttgcagtgagcagagatcgcgccattgcactccagcctgggtgacaagagtgaaactgtctcaaaaacaacaacaacaacaacaacaaaaacaaacaacaacaacaacaaaaaacactactttttaggaaaaagcaatgcagaagggctggtaactaattttttcagttataatctacccattctggcacctatatctgcggtggacactggtgaagcactgcgttagcagggttggatagtgaagtttttctggctggcccagagaggacagcagtcctggcgttgagggagggttcatgattatgggccctcagtggtcagaattcacctgtaggtccagcccagggacagctgctgatgattcaaagtgggaaccagcatcttttaggtaacaaggcaattgtttattgtttaataagcggttgctgatacaatttaaaaccatttttcttacataattttataagttttctatggctttacataatttttatctactcataccatgcataaataaaatatacattggtagattgcaagaatcagtatgtgggaatagaggctaggcttgaaaatgtttttctttctgacatatatatgatattggctacagtcaaatagatgggaggctttgacatcttatagccagaagattctaaatgtttactcccattacaaatgaaaccaagataatgctatctctagatgctattttacaaaccatgatgattgccaaggttaattttaaaaaatctaatggacttaccacacaagaaattttggggagtatttattttctatccacattagttcatgtatagtcatgaaactaaaatatttctctggttccatggaacctaatcacccttcaaaattaaaagatgcctttatttcaaatatttctatagctggggtcattaaaacttaaaaatttgtaaagcataacttgtaacccaaaatgtaagtattagatattgagcattatataaatgttttaatgttttaatttttaagtttttagagatgggggtcttgccatgttttccaggctggcctcaaacatctgggccctagcagttctcctatctcagccttctgagtagctgggactacaggtgtgtgccgctgtgcctgactatacagatttttaaacttcaaaacatatgaattgttagaggaaaatttctcatgaatttataatttttttctttctgtctaaagctctggcttatatcagttacaataatcacattttcttcaaaaaaacttcaaatttcatagattatagaaaatgtcctaagataattttattggatcagttttttattcttaaaaaagtttcatatttatggaaatccttcttttgtttgttgtactctttatatcagtttcaccatctataaaatgcagataataactgtacttaactcacggggttggtagaatgattaaatgacagaaccaacatgaagcagtgttcctaacacataacaagcagtcatcacatgttagattttattactgtcaggctgtaggaggggatggccacttaagcccctttccgtgcctgtgtctccagtgaccagatattggttagcaagccctgcagcctggatgcatcagagctttagtagctggaagcagccttccttcatgttcaagttgctttatagcattactctgatgagatgctgggcatgacactcactgaccccaagagggcaggttgggtgcctcaagggtaaggattctcagtgaaaaacaggacactcagccaaatctgaatttcagataaacaataagttttttgtttgtttgtttgtttgtttgttttttgaaactgagtcacgctctgtcgcccaggctggagtgcagtggagtgatcttggctcactgcaagctctgcttcgcgggttcatgccattctcccacctcagccccccgagtagctgggactacaggtgcccgccaccatgcccggctaattttttgtatttttcgtagagatggggtttcaccgtgttagccaggatggtctcaatctcctgacctcgtgatcctcccgcctcggccacccaaagtgctgggattacaggcgtgagccaccgagcctggctaacagtaagtatttttaagtgtaggtatatccctagtgaaatatactaaatatatattatacttgactacaattattatactaaaaatactaagaaattatttgttatttaactgaaattcaactgggtgtcctgtatttttatttgttagacttggcaaagcaactctgggataaatccctgctgcactgtgggcagggacctgtacaacccatctggtctggcacagtgcttggcacacacaggacctggaatttttgtagaataagtgaactgagaccacattgttgtctgaagtcagcctgccacccacctctaaacaacaacaaccaccacaaaacacaaaaaacaaaacaaacaaataacaacaacaacaacaaaaaccaaatgaaaaaaaaaaaaaaaaaaaaaaaacctcctgaggtctaccagatgcccatgagagactggccacttctcctggcccttcagggtttggggatggcacagtgctatttggtaaacatgaaatgtggagagaagcagggagcaagagtagaggcaaaaagagtaatttgcaagggaacaaatatgaagaatgaagaagcaacaataaaatgtctgggataaagaaatgctctctagatctaaggctgatgagaattctcaccgcaaagactttctcttctgcacaatctcccttggttttatgatttagatttgtagagcacagaagtcagtggactggggtggtaatgaagtcattgaggcagccaaggtctccagatgggtcaaagggaactttctgtttctggccatcaatccacctgggcatgccacagaactttgctggcagggaggtaggacaaatttcaattccaataaattggaaggtcaggaaatggtagatagagggtttgggtttatcataaacattccctttcctttacttcttttcctcttgcttttaaaatttaatataaaaagatagaagtattttgttcgaaacaaagtttttgaacaaaaagttcaaaaaccaagatcttttcctgagataaacttctgcttccctcctagagcaaggaaacacatcacaaatgtgaaagtgctggcagatccatgggtcctgtatgtgtttactcatagagtggtgggggcaggggccagtggattgggctcacttagggggttgttatttcttttccatttgtcacttttgaccccagaggtaattttacagaaatctttgccagagttctataatcccctaaatattaacttggccttaactcaacacaccacattacaagaggttcagataatttctagtctgaacagtttctggtctctgttgccaaagcaaagtttttaaaagtacatctagggattcccagggggaggcctaattacctccctcttgtgtgaacggggacttcccttagaaacaaattggcccttgggctgctcgctgctctcactaagcggggagatgagactataaagctggcagggggtggaaagattggcagcctctcttcctggctccttaaatcaaagaaaaataatattagttaatgtttgatgatcttggcctacaattccatgtccaggatatgtactcctgcagagttaagcttgttaaaggagaagtaggagaatgcaatggactaaatccacattggagtcctgaattcttagaatgctacgttccttactcttcagtaatctcttgggtcatcagtcatcatagagaagatcccccaacttcacagtgctagcatctgttttgggactgcaataaataatgctgctggaacacctaagctggaatgttaagggaaaggacaacaataagactcagttcttggtatctattctgcctctgacctgctcagtgggcaaaagcagagatgggcaggtacctagttatgtggggatcagaatgtgatcatgccaatggtagaactctgctaaaatgaaataactccatggtttacttcatttacacaaaattttaaaagagttttcaaaaggagacagttgtgggggaaactgactgaacagaatcttatggggaaaagcttaggttcataactccaatttcatgtttattagtgatgctataaaactcttaaggactctaagttttatttttgttatataaaaatgggattgatattacatcatcagattgctgaaagcattgtataagatactggatttgacagtgttgctcacatagaatgggcatgaaaaattcaaggcatggtaaaaccctgagtggctgctgcttaatgtggacatttgacactgaaagaaggaggtttgcgcaagtgttaccaatcctagaagatatgcttttcctgctcaaagccagggaggactataaaatccctcctcttactgcagtatcttaaacagtgcgtactaaaagagagggactctcctactccatgagcatacaagaactgggatatagaaatggccaattaaaaataaatccctgtacttgaaatatgaattctgagcaactgcagacagaatttcctgaaattagaatgaaaatataaaagccatgatacaaggaagggacacttctaattcagatgcccaatcatttgctcacttttcagttatttaaccaacatgggagagaataagacacggaaaagggatcagcaaaaagtgcaaagcccctgcttttcctactcaaagtgagatccctggaccagcggcatcagcatcaccttggagcttgtcagaagtgcagaatctcaggttctgatcccagatctactgaatcagaatgtgcactttaatacggtccccaggtgtccagtgacacgttcaaattttgagaagcgatggcccagacaatgaaataagagaatctgaagtggaccagggcagaggcctttttcctcaagcaaggctgctgagggtttcactaattctgtagtaaggtaagacttaatctgtggattatttggagttggtaggctttgccttttatccttttggggatacattccgaggtaaaggtacattttcgggttttgctgctggcagatactggttcagatggaccccgaatctttagattcctgagacgactgggcatatcaggtgagcagtagccttaacagaagacggccgccccatcctaatgaactgccacccagatataacacaagttacaaaatcactctgtaaattataaaggactgtaaaaaacgtagagtaggaatatcatcaaagcactgtcaatcaagagggagacctgtaaggcaatgtgctcttctttgtctaggctgactttatcgtctgggcacaggagcaagcaatagggtctggccatgaggattaaagagctaagacattgtcactcttggcatttgacactggaagagcaggaaaaatggttaaaattttcctatttgatacatcttctcatagtcttcatctcaaatatgatactgtaacccaattttaattgatagaaacatagttacccagaaatggaggatatacttaatcaaaaacacatcaataactgacctggggatagaactcctacataaaattctgtgattcaattcctagtctacctagaattcagcccttacctatagcaaagtttatctaacagccttcaggctgccaactaatgaaaagcctatcttttgctttatgatgaatatgaataatattaagaaccatttttcctcaactgtaacccatcttagagtagctgtatctcaaccatggccacactggtgtgtgttcatcacctttcatttattaaatctctttcctttaggtcccagaagaaagtttagggaataaaatattaggtattaaagagagctctcagacttagtctgggtccagctgtatccaacatttaatacggtagcttttaaactcactgtagtaaagaactattttttttttaaattttcatgtcacagaccaatatttttgtaaaaatagcaaaaataaactactagagaaacgcaatgaataaaacaagacatacaacgtccactgatcaggtacttggatattacagcaatgttaaattgctataaaagttctaacttcttattttcttatttttaatatctgcaatcgcttcatcacagtctgataagaaacagtttgcagatgggcactggtctagtggatatgccaacacctattataatgcacacctgtaacaaagtgctaatgctactcattaacatttacagagggctttctatgtatagtcttcactgttctaaatctggtacatgaattgcttctcacacaatcaagggaggctgaccctattagtaactccatttacagatgaggaaactgaggcacacttaaggtcacttagctaaaccaacattaaatccaactgtttgcctccagagctctcacttaacactccactctgcacacttcctctaagtaggtgtgattcaggttacatctgaatctaccccaggaataagtaatacatattagggcactggtgatatagcacggtaaccaagaagagttattacaatctgatatctctgaataacatcctgtgggaatcagacaccagaatagagttgatatatagtcacgggagcaaccctttgtattaattggaaaaatgaattttggcaccctcttttaacacaaactaaaaaggtgttcaaaactcagaaaatgtcatgcaaatggcaactttaaagttcaattatgacagatactaaaaaggaatagggagcatttggggaaccaaaatagtgaatagctaggtcatcagggtccaggaagaagtgtctgagcaccagctggcaccctggccctcctctcacgtgggttgtagagggtcaaggtcctcttacctcttctcccacaaacaccctttttcctcattccctaggctagaactttggtgttctctgtcttgcttgaaatgggaagccagcgcatgggtgcctcatgaaaagctttctttttttgtgtgccctgtgttttgaacattgctatgttacagaaaatggacctggttccccatgaagctgatattacattgcccgcactccatactggggctgcccgagtctctaccctactgtgtccttacatggcagagccagcctgtctgaggtctcacactccctgggcctgcttcattgtctccaaagctgataacaatgtctcctacctacatctcgtgctgatagatgaattcctgaaatgcctttaaagaccttcacatcaccctaaatgctgcgttaagggaggacaactggtggagtaaatgaataacagctggaacataaatggtaccacatgtcagacttaacctcttcagtaagaagacgggcccaaaaccgaagcctttccttccttttccatgcacagaggagtaacaacagccacagctactgccacaaatggctgttatgattttctttttacacaagtgatcaccatagacctctctagattgaaaagagatactcgtttcctatcaaaactcttgtttcattcttaaaatttaccttggtggggcaaaattatagtcagcttttcctaagcagggggcaatgctgaccagaatgtcccatgtttttaattatggttctgaactgactcgtgtaccttccctgaaccaacagctgctttcaaagaattaatttctctttgtacgaacatgtcttacctaaaaatgtggaagttcttgtgaacactttaagaccttatttttccttccatagagcatgggctgtgaatactagctcttcaagtctgtggaagagtagagggacacagaaggacacctaatactccaggccaggatggcatgtgctgggaggtggaaaggttgtatgaactgtgggagctcagaggaaagcacagatcactatgtgtgatggtgggtggaaaaggcctcatggagaagtagtaccaaactggagtcttggttctgaatgccagctttcaatgggaagagaggcacaaagagggcattctagaaggtgatggtaaaggttagtggggtacctctttggggaggaataggcaaaagttacccttgacattcctttaatattcttttgaattatccatgaaatactgtgaaaactgtaactcttatccacattgaaatttgagattcactggactagattaaaagaagaaattaagagaaacttaatgaactgatgtctgggcatttgtattactggccctccaggaattaccatggactcacagcaagaattttactttgttcttgcctgtctgcaaggtttactctattacgctctactatgaagtttctattatcccgatgcatatgaaaagactttttgttgtgaggattaaacaaatcagaggggaaagctcctagcacaggagctaccatgtggtaagagctggtttaaagcttgatcaggcctacatatgcagaattttttgcagagttgcagagaagaacttggccccctgttctctgcagtttgtgttgtggactcagtgaagagcgattactttcaaggtcttggacaatgtcttggggacatgatgtctaagcatgtgcattactgttatttcagtagagttaggttctgatgtgactcccaggatgtcaagatgggaactctggaatgacaggttgcaaagggcctcgtagttgaaaaggttctttacaggctgtgttgcttgagtatacattagggccacacaatacatcaaatatgtctctttgctgtactccatttctttgatgttcattgcatggaatgtaggataaatggaattctggagccactccaaggaagacagatttcctggagtcatttttctttgaatatagttgagttaccctattttcccttcattctcctgcatgtgctattgttttatttccttccctcctttgtatcatctcttttcacttataccaaagtcagatttacacctattcagtcagttttgactataatttcgctttcattatccctttctgttttcaggcctgattcttaaagtgaagagcaagcataaaatctcataatcactaccaccatcactaccaaaacaacaaaaaaaacgcaacattcatgtaactaagccagaggattggagaaactataatcacacactttgtcttaaacttttcttacacaaacaacttctttttcccccatgactttcacggctttggctgaagtttgcaggctggatctgagggaactgtaaccttcctctaccctcctctgccccaggcctgtgtcaggaccctttctccttttttccttgggtctccccttctgctttttgccatcatcatcctctctccctatcttttctcatttgtcatatttatctcccactgctgctttctctccacaatttccatccctcaaagtttccatccccaactggggcctgtgcctaacctcctactaagaccacctgtgacaaattgcccccattctgatggtgcctgattatagcagcctccctggcgccacattcatttggcaaaggcatcttctaggcaatgatcactccactgctcagctcagccagttacagaggtgcccagagctcaccctctccctccccagcttcaactgggccctggcagacaaataacttgatgttgaagggtagataggacttgcacggtattgaaaggtatagatctcttctccaacctgacaccttctcctttgcaatgcataatagcccttgtacccttttgcttcttcagaattaatttaaaaaatataaatgctttgcttggctgtcctgttatttagcctctgttggtttattatttacatataaacattctttctaaaacaggagcaggaaaagtgcaagtgggctcacctggtgcttctaacaaaactcacttaatttattcagtcatttggcacaagaaagcctcctgtctgcttcagttttccattctttctaggatgctaattgtttttcttttgataatcttgtagttttggcctgaagtctaaaatctggcctgctgggctacatgtcagatttgtaaattagatgacatctgttttgaattttatcatctttaattttctttcaagctcccttcacttattcatttcccctttaattgtaaggatcagattttgctgcatgctttagacaaaagtgcagacctttctgctttgggggcaggttaaaatgactgaagttaaatggtcacaatgaagggtattcaaggaaaagatgttgggagagaagccttagcaaccattccagagaggatgagccgttcagacaaaaggctggctgtccacacgagggtttagagattcccactgaataattacaatcgattagaagaagattgacagcgaggggttgaactgagagaagtattttcaattgagagaggttgaggtgggggatgatggcagtcgtggtaggaggtgagtggtgaccttttcatctctttacatttcattttgccctttctttgtttcctactctcctgccctctcacctcagaaaaatactaaaaaaaaaaaaaaagatatttaaaatgcattctcatacatgcagactcatattttcatagtgggaccttattttttcttcctacctacatatctcctaaattcttcttttcatggggaaattgttcattgctaattgggttgggccttgatatggttatgctttgtgtccccacccaaatctcatcttgaattataatccccataatctccacgtgtcaagggagagactaggtggaggtaattgaatcataggggcagtttcccccatgctgttttcgtgatagtgagtgagttcccatgagagctgatggttttataaggggctgtttctgctttgcttggcacgtcttcttgctgccttgtgaagatggtgtcttgcttcccctttgctgtcttccatgattgtaagtttcctgacgtctcccagccatgccgaactgtgagttaattaaacctctatcctttataaattactcactctcaggcagttctttacaacagtatgaaaatggactaatacaggcctacttattaaaaatatattttcctgttaagatgcctatgtaacacacttatataatattttttctctttatataaagcttttcacatatataatctcagaaatgtcaactggcctcttgaaaccttgtgtccatagggaaaatagagaataggtgagcactggccaggacatgggccaaactttcactcatggcacatgttagccatggcttggagaagacacacagttcagctgtgcatacagcacagaatggctccctcaaataccagctgcagagactgtaaaccaaacttctgaaaccacgtcattaaaattggccaacagcgactttgtgggtgcatataaatggcaaatctttttaatgatgctggccttgactctcctggatgctgccatgtgttcaggtcattgccagttaacttatgggtctatgaaaatgctatttttgaatggtatatatatatatatatatatatatatatatatatatatatatatatatatagtagtgattctcaagtgggggaggtttttgtttccttggggacatttagcaaaacctggagacatttttggttgtcacaattgaaagggggtgcttcttctatcatctagtgggtagaggccagcacattgctggtgaatattctataatgcatatggcaatctcacaactgagtgttatctagcccaaatatcaataataccagggttaagaaacccttgtaataggcatctgtatatcaaaccaggtgacaacacatttttatatgctcaatcaaactcattgtgttgaaagaaaaggaatttaccgactctacctctgtgaatagttattgactttgatgacactattggtcagattacattctctgtgtgtaggggttaagagatcgtcccaggttggcttccctcctgcgaactcctttcttggttatcagcatcatctccatttctatgcggtcattcaagctacatatctctgggtgttcatccacccccctcttcttcttactccacctccaataggtgatcacttcctcataattttgtgtcctctaatataatgatctgccctgacttcttaggctctcatcattttgtctagacctctcactttgtctcttgccaactggctgctccaaccaaattaattcaatgcttcatgatgttagttactcgtgatttacttattcatttggtgaaaatatttgagtgcttactatctgttaattcctgtgctaagagctgtgatcattctctggattaaaatctttccaagcctccatgttgcttacagaacaaacccttgcttctaacacagcatgaaaggcctctgataatctgcctctgacctaacttttcaacttactttcctgccctactgaacaaattatctttcctcagtctgagcacatattattaagcccttgtatctttgtatgtgctattttttttaatttgtggtatcctttttacccttatctggggaattttcgttcattctgtgcaacttgacctagtgtctagagaaatgcttggcacatggaagataataaataggaaatgaacttaaattttaccttctctgtgaaatattcgactttctggctgctggtcagtacatccctttttcaccatagcccattgtatgcacttttagcacatcacatcctctgactgtgactcttgatggtaaggatagtaccttatatctcttaggacctccaggctctacaccatgctgaacataaagtagacccaaatgactaaatgctcactactctatcaagatggcttctcatggaattcttgtttcacactggaaatggcatgcatcatttgttattccaaaaaacccacagaatttgacactagtctcaaatgggccccaccctcctccataactgagcaccttccattgcctgtgatctgaattatggagatggggtcgagtccatcctctgtcatttagtcattgtgtaacattgggaagatatttaaccagtatctgagcctctgtttcttcttctataaagtaggagtaagtgacatctgcccttcttgccttgtagaatggtcatgaggatcaaatgagattacatacataaagggcttttgtaacttctaaaggtcataaagctttttaagtttctctctattcaaaccagagcaaaaacaaataaaacccctccctcaaccttgcatggccttgtatattttttccaaagacaagcttcttgaaaaggccagtttgtgcattgtgtccactctctctgcaagccccatcaccctgttttctgctagccacaccaatggcagcttcctcacctcaatcgtcaataatttcctcatggccaacacctatgcacacttttctgctcttccctcacttgatctggctcatctgcctcttcctgagacatcctctgcactggggccagggtgagcttcctaaaatctggactgattataccctgccatgtacaaagctccacaatcactcctcactgcttagagggtaaaactgaactccttagtccactctgttgagcctatcatccactggtccctgcctaccacttcatcagcatctcctaatgttattttccttgtaacataaccctagtcatacaaaatgacttctgtttccagaaagtgctttttcaaatgctgcccaaaagacagcctggtgaaatctggtcatctttcactacttggttcaaaatatcacctcttcagaggaaactcttctgataacaacttcccacccctctccctttgatgcagaagtacatactctatctctgtattttccatgccccttgaactcatcttgataagcataacctttcggccattctgctattctcccattatgcacttaaatatttatctcatactagtcagtgagcttcttgaatacaagaaacctgctattatctctctatatatgtctagcttcctgatacatagtaagctatgtttgactattcagtatgacaatttaaattgttaactgcttgttgagtaaataaacgggtgctataaaatattacttgcactatgttctaattcttttaccatattttgtgaaccttttaaatttattgttttgttacattctggttttcacacatttagaagaaagattctggcaagtgccataatttatacagatattattctctgttgagatacaggttttagcttcctttggaagttagagaggcttaactgtctgcattctacccccacaggtgcacagcagctccctgaggtacacagaagctcttgctcacctgccacttccagccttggtattttccagttgtcgggtaaggagtttagcaatggcggtgaagctgttgctcatgcggaagatgtctctgctctgagggcccaagattgaggagaaggtgtcggtgatgcttttaatctccagcaggagaatatggtgaaacgaatgctccatgttggccagttggctcaccaggtatgtcaggcagctcctggctctctcctaccaaaaacaatgaagaaaataggtttatcttttagaagaaaatcatccaggcatggtggtcatgcctgtaatcccagcactttgggaggctgaggtgggtggatggcttggaactcctgatcgagaacaggagtttgcaaccagcctgggcaacatggtaacaccccatctcaacttaaaaatacaaaaactagccgggcacagtggcacatgcctgtaatcccagctacttgagaggctgaggcacgagaatcacttgaacgcaggaggcagacggtgcagtgagccaagattgtgccactgcactccagcctgggagacagagggagactcggtctcagaaaaaaaaaattaataaatagaaaagaaaaaatcagagtcccatgagcagcagatgataattctatagggagctgactcagagagctagctcaagttgaataatcagtttcattcatagttcctctgagtctgcttctttgagatttttaatttattcctgatttccaggacagactaatatgcaaacatactcattaacctatctttccaggtcaaaacctctcaaccatcataaatgatgagaccccacacatgcacctctcacaactatgtgagctgctaactccacctgcacggggcaggtacggtccatggtctcaaagtgagccttgaccctggcacacttaaaccatctgtctgtcggggtgatggttgcatattccactagtgtgctaggttgatttccttgctgcaggttttctcactgacttgttaactttaagcatctttcagtgtattacagtttttatatgcttggccgattgagtagattatattatctaggtttaaccaagctaactttcacagtcatttaagttccttcaaagaatgaaagattaaggacaatatgaataatgtaggcatgagcaaataagaaaatggcttagctgacacatctcttatacctattaaaactcctcattagccatattttgaggcaacatgatctaatctgacatgactggaagttagccaaaaaattcaatattcaaaattattgaaaaggttatttgaaatgtagatttgtgcccaatagaaataatgatataccattaataaataacaatttaaaatatggcttatttcacctttaacttttcttttaaaatcttatttttgtgtatgtctaaaattttttcttgttagtatagtggaacatatgtataaatataaataaatatatactggaagttgctgctcacaatccttctgactaactggtgcacagatctagattactcttctcgttaggaattcttatttaccctttgtgctagcatttgaagccttaatttccttcaaggtgcaactcttccatgcagctgtctccagtgactcctgtgtaaatttttactgcattatagactctttaaaaatcttaattttattttatttcagtatctttttgagacagagttttactctgttgaccaggctggagtgcagaggtgtgatcatggctcactgcagccttgacctcctgggctcaagctatcctgctgcctcagtctcctatgtaggtgcaccacaggtgtgtgccaccacactcagctattttttatttttatttttttttgtagagacagggtctcaccgtgttgcccaggctggcctgggctcaagtaatcctcctgcctcagcctcccaaaatgctaggattacaggcgtgagccaccgtgtccagccaaaaatctttttagtacttaattgcatttgatcatttgcttactcatgcttttatttaatcaccaaataggtatggcatgcctataatatgcttttactagactctagataacaaaggtgaatgaaaggatgcccttgcttttaaagaacacacaatccccctcaccttttatttataatttcctaatggttacatgtgccagtcaagtcttctaaaggagctacttctcagtcatcagtcatcaacctggcactaaattgagcctgtggattctacacccagtgtgtgtgtctcaatttactgatttaagaaaaccttatatatcaaaatatgaccttataaataaagtatgttgttacaaaggaattctgtgctttacaataaatatttaatacagaacaaatttaagtagtgaagttccctcatttttggtacttgattttcaaagattccatgtacagttgcactggaacatatctcttggggtaaatggggtacttctgccatcaatcccttatttattttttaaaccccactagggcacagtgtcctgtatgggtatgtgagacagaggcttgtgctttcatgagctggacagctagttgaagctaaagacatctattcatcaaagaataatgttagatgaatgaaaataaaagacccctggaatatgttcctggagaccctgtttcatattttgggtcatacaattgccaggttgcagaacaatacttaaatgctcttggatccaacagtttttgtttttttttgcaacatagactcatttattaattcaaagtctccatgtgtgaattcatgatatgcaatgcatcaagggacattttctattcctgatttaaaggtaaaagctggatgtggggggtccctaccatatgccagacccccttctagaagtcaggaacatatcactgaagaaaaagcacaaaaattcctgccacaataatgaggcagacagacaataaacaaaatatctttgtaaaatgtatagtgtgttagatggagaaacgtgcctcaaaggaaaatgaagcagaagggggagccaatggtaaatagtgtacttaggacacatctcagagagaaggcgacatttgaatttggcaaggtttcagactctaaactcaacattctcagtaaccttagaaaacaattaccataaatttatcctgcttgatatagggtggtaggaagatacaggaactgaattttatatgctgtttgtcctactaagatgtaatttaaaatttgaggtaacttccttactttcagaagtagatttttcattagaatttttaaaaaccgtttcacaaacatttcatttgcttatgcaataagtgtccccatggtttcattaagaatccttctcactataaaaatttgcaagccccttctttaaagcatgtgtcttttaaaaggtgaaggtcgttgtttgggtatttgccgaaatcaacataattctgaatgatcgctggcagccaactgagttgaagggaaaattaatcacagtgcaggaacaggaaaaattataactgctctggaactaaagtatgaaaccaagccaacctcacatcatttgttctgaaaccttggagcacatccatgtacctcacaggggtaacagatgtgattttggattagaaagtgtaatattagggcaggaagggggttaggagattctgatttccttctcagcttcatgatattttgcctctgagggctagtgactggattttcctgctttcagtcaccccattgaggggtagggtcagcacctgtaagccttaattgtgggtctgaccttatccctgctgacacaaattcattgtttattattaaacaaaaatagctggcccagagagggcacttactctaagcaccaagcatattctatactcttttcaggtatttactcatataatcctccaaataatgctataagtactagaatcattgccactttaacaaggaggaaactgaagcacagataggagactaacttgctcaaggccacatatgccctccctgtttctacatctagaccctcacttgctatactgccagctcctcccatcaaaaaaaaaaaaaaaaactaaatgacctatgcacatatttttccactcctttttcctacatctcattcatcatcagagttatgtggtcttttttgttaactatttttaatttagttatataaatattataaatactctgtatatacaaaatagatcagcaattctcaaatcttttggttttaggaccgctttacactcttgaaaatgatcaaagatcccagagtttttgttatctggtttatatctattggtattggccatattggaagttaaaataggcaatttttaaaatgtatattttcattaaaaaatcacattttcaaaaacaaaaaatttagtgagaagactggcattcctctatatttttgcaaatttctttagtaacttgttaatagatgacatctatattctcatatgtttctgtatttgatctgttaaatctggcctcataaagatttgaagttagaaaagggaagactattttcaaaatagccttgataattgtgaatattcttcttggacgctacaccaaaactcaacaagtagtttctcaaaggttagttgtgatatgtgactttaattaactttgtatcctattacattaaaatccactggtctgtcttgcactttgattaaatcttttacctatgcatgactttgaaatattaagcattagtcatttggaaaaatatgggtttactgtgttaggcatatcttccaaagtttgatgcatttcattatataatataaaaaacattgcattcactattttcaccactgatctcatcagaaaagtcttttaagtattgggaaactttcaagttcacagtggcagataatagattttccaaaactccaattttcatttgcaagctcaaattgtatcactggcagcaaatactagcatcagtagttttgcttgaaatgaaaggctcacttcattcattttctggataatgtctaccaaacagccccaaacaaataatcatagattgttcattagttgttacttcaagtaaaaatggttccacaaaaaaaaaaaaaaaaaaaaaaaagtggttagtttggcacataggcaaataacacaaggtttttttttcttaagataaccactgaatttctgtatttcaatcagcagcataagtgccaagccaatgaatccttcccatttagccagagagaaacttaagaagatgtgtactcaggattgagatttaataaaattaataatttctactgcttcatcaggttaattcagtggtttccagggggaggcagtggggaaaagaaagggagaggagtgatttttttcctccccagagggcatttggagaatgtctggagacatttttgtcacgactaggagaatgggagggctagtggtatctggtgggtagaggccaaacaccccacaatgcacaagacaaccacacaaccgagagttgtttggtccaaaatgtcaatattgccaaggctgagaaacactgacttaggagaaactggctctttttttcttgtcctgcaaacgtgtggtggtaaagaatatgactacgagtacagtgtggtgccactgtcttgtcttggtttgtgcctaggcacttgcagtttaaaccaccattgctttgttctattaatgcaaatgtcaacacagtgaaaatggtaaataatgtcttagtattattgtaaaaatagctttgaccttacagattccctgaaaaggtcttggtgtccatggaccatgctgagtattgatgaactcaggatcaggagtcaaataaatattttctctaaaggaacagacagtaaatatttccagtttagtgggtcagatggtctcttgttgtgggaaaagagctaaaagcaataagtaaattagtggatgtggctggatttggcccacaggcagtaatttgttgacccctgaactagattatatgtttgcaaaattgcattggccatttttttcactttttattattttgtttttttaatactactactccagtttcataaaggtgctctgctatcctttgtcagaaaaacagaacacaactcagaaaatggccaaacatgaaaatgtgggggtctggataataacaatagtttccattcactaagcatccactgtatgtctggtacttgacatatgcattttaacttaatcttcacaatgaccttgcaaaatgagtatctagatgaggatattgatgtaaagagggatagtaacttcactaaagttgcacaggtataatatagctataagtggcagagccaatattaaatcaagattcatctgattccagagtttgaatgtttccacatcactagggctgataaaaaccatttagggcagctctgtaggctgcagccctcctttctgtactccacctgtggtagacgtcaccagctgatgatagcattctttcttccctgctgaacccagaagtttcctgatgttctttctcagtgctgtcctccttgtgagtggttctcagcactggctgcacattagaatcccctggaaagctgttaaaactattctaatgccacgtaaatctctcctgcttcccaattcctgttcaattttattgaaatgggtggagctcaggcataggaatttttaaaccccttggatgattcagatgtgcagccaaaggagaatcactggtctatgtggagtcctaaatctctgagaatttgagaatttgctgatgtaggaaatgtggatttggccctataatccacatttttctctcccctgtcttttatcactttacaaatgtaaaaaaataataatatattagttgcctgaatgaaaatattgcatttcccgggcatttgtattttacaccatttgatttaaacacaatctttcttcatagttcaactctttgaagtctctacacacatcaaagatacacttgcaagggccattagaaatgtaaagcaaatgagttttttgttaatgttctctcaatggaactttgccagagtgactccaggcttttcttaggagccttcaaaagcctgagtgtggccagtgatgcttaactgcctgggggcgtatttattccatgagagtctctttcttaattgaagagacttagctccagaccaagagttgaagggtttgtactagactctcctcccaccccaatgcttctttggctgtgagaaactctggtactgggggagcaattctttgccccaagattttcccagttttagaactgcaagcctcttgtcccttgtcctgggaaactccttaatcatgggcaaatcaggacagttgaccaccctcctctggagaatgtaggcaggtagaaaattcaactcagaggactctgttcaatagactcatattgcaggtgaatatgatgatatatcactctatatgcttccctatacagatacagttggccctccatattggagggttctacatccacaaatacaaccaattgcaggtcaaaatatttggaaaaaatagaaaacaatataacgataaaaataatacaaatagaaacacagaataacaactatttacatagcatttacattgtattaggtattataagtaatctagagatgatttaaagcacacaggaagatgtgcatatgttgtatgcaagtcctgtgccactttatataagtgatttgagtatccttggattttggtatccacgggggttctggaaccaattttcctcagatattgagggatgaccatatataatatgttgattcttgttatttgggaataacaagtagctatgttccataaaattacaaccctgaattagacaatactgaagtattgcttctagaggaaattcagggttagtttcctgcaagcctctggttacatttttgttaactgattcatacataacattgttatatgtgtgtttctgtttaaagctatttaatatatactgttgattcattaaatttgaacccatggccaacagcaaggtaatttatgcctgaacaaaacttatccaacatatgtattttctccatgaggcatatcacagtcttcttgtggttaggaacactagagagcactttagtactatacttgggggacactttaaacagtgaaatcaccaaaaacaaacaaaaaaaagcatgaagataagaaaaatgtggcaataaagaggccatgaaaagaatagatacttgtttacagtatgagagctgaaccaagacagcagggcatcactttgttcaacctcagctggggacaactgaagttttttgctactctgtgcacatctgtgaatgactttgtaaccccaaatcaatactatagtgctttcaaagacatttttagcaagtaggtaaatttgaaaatataaaatcacagagctggatggatggataggtaaatagatggataggtaagcagatagatagatagatagatagatagatagatagatagatagatagatagatagatagatagatagaaatgcgtacatagatggaccaatccattgatggatttcagatctttgtggatcttctgtaaaaggaaaaagattttccaaagcattaggggatgaatttctatgaaactccttgcagtcatgcccagagagatgcaagatcagctttactgaggtcagctgaaattttatttgattttaggtcttcagcatattttccagtttatcttcccttctacttggctaccatgggcagattttcttattgcctttgcactaattgggcttttctttcattagcaaattactaatcatcctaatccatgtgagcattgttttccatccacatattaattcttctctccattacatattgttttataaatgtgacccaactcaggtgtgcagattgaagactggggacagtcatttgcttttcacttgcaacctggttgtttatagaagaatatgaaaagtgtgggtagcactggcatatgctgaaatacttttactttcttggttctcacaataaaagacaaaaaaagtttgaacaatgtaatttttaaaaagaaaagatccatttggtttgggacaatgagttagggttacgattataattccaatcccatagaatgagaatccaatcccaatctcatagaatgagaattgtaattttaagaaagtcaaaggaggaacttttctactaatcctttttcaaatggatcctgatgtgcttggtaagacatttattaagtagtgttaagtggagatattgaaacttgttttatttttggagttggttatgaattggttatttgtgaccattttttaaaaaacacctcattttgttttgttttgttttgttttctaagatggcagattagaggattttcagagtgcctcagccatttggaaatagcaagatagtacataaagatcagctctgtgagctttaattcaagaaggagaatgggactccaccagaatcatgaaggataccccagatcctggagaggaaaatgctggaataaagcccccatgacagcatctggctgataaaagctgaaacatgtttctggccagcccaccaagctgtgggtggtgacctgttcccatttgccagactaggggaaaagagctgcgacccttctggaggcccagacctcaggactccctgagccagagctgtgacacgctgtaacatcccctcggggctccatggttgctggcatctccaagtttttgggcaccaccacattcctcttgtccagatgccagcgcccaaagcggaagctgcttgaggcatgcctggtccagccacagccttgcatggagcttgcaactctgctgatgcctggagctgcctgccacagcagctggtgcacctggcttgctgcggccagatcttgtactttgtcactcacacaccccttgccgttccacgcctgtctcacctgtggtgggcatggggtctgggccagtagtgtgagtcaagcacagcctgccaggctgagtgggcagagccagcccaatggtcacaaggaaaacttgggcagaggtgccactggccatagaggtttccagctgccaaagcagcaccaaaagaatcctgtgtcatcagtacatgagaggcagagagcctcctttgtgactcatttttccactggggatccaagccacccaagctgagggagagcagtttgtttctttcaagccctagagctaacttggggagaggctcttggagatattctgagggaaagacaatgggaaaaactgcactttcccagacctgggactgatggcgggatgccatttttaatccaggtacatataaagtcagccattaccagcggcatggctgcacagacactgtgcagtccaaagactcaggtcagagtctttgggaaatatgggattatgtaaagtgacataccaatcagacattcctgataaagaaggagaaaaagtaaaacacctggaaaatatatttgagggaataattcacaaaaactttcctaatcttgctagagaggtaggcatctacacataagaaatccagagaatgcctgtgagataccatacaaaatgaacatcaccaaggaatgtaactaccagattgtccaaagtcaatgctaaagagaaaaatcttaaaggcagctagagaaaaagggcaggtcacatacaaaggcaatcccatcacgctaacagacttcttaacagaaacaagcaaggagagattgggggcctattttagcactcttaaagaaaagaaatttcaaccaagaatttcataccccgccatactaaagcttcataaatgaaggagaaataaaatattgtccagacaaggaagctgtaagagaatttgttaacactagatcagccttagaagagatccttaagggagttctaaacatgaaatgaaagaatgatacctgctaaataataaaacaaaaacacacttaagtacatagcctgcaaccacacaatagaaacaacaaagcaaccagctaacaacttcatgatagtatcaaaacctcatatatcaatatcaaccttgaatgtaaatggttgtattagtccattttcacaatcatggcagaaggagcaagtcatgtcttacatggatggcagcaggcaaagagagagcacgtatgtaggggaattcctctttttaaaaccatcagatctcataagacttattcactatcacgagaacagcatgggaaagatatgcccccatgattcaattacctcccaccgggtccctcccaccacatgtgggaattcaatataagatttcagcggtgacatagccaaactatatcaatggtctacatcaggggtgtacaatcatttggcttccctgggccacatcggaagaagaagaattgtcttgggccacacacaaactatgctaacactaataatagctgatgatctaaaaaaaaaatcacaaaatatctcataatgttttaagaaagtttatgaatttgtgttgggctgcattcaaagctgtcctgggcctcatgtggcctacaggttgtggattggacaagcttggtctaaatggtgcatttaaaaggcacagcatcttatttaaccactttgagcctaagcttcatctgtagattggagctaacagttcggcggcagatacttttgattgcctatcactaattgtatctcaccctatccccttctttcttattggtataacccccagcctgctataaagtgaaaatagctattctatttctcaggctccttttaaactagggcatgggtatgtgatttaatcctgggcaactggacctgatgtgaagttttctggggtagaagactactgaaaaatgttttcctcccagataaaaagagatggaagaacacattcctgttccttaaccagacattgttgtacctatatgcactacctggatctgggcagttatctttgcaagtgtgagggtatgtttatgggaccaattcaaatataatgatgatggtagagagagaatagaaagaagcttatcaagagttcttgatgatgttgtggaacttctgaacaaacctgggacccaccctgttttccaggcttcttgttataggagataataaatatttttcttctgaatcagctttagttgcaaatgctattaccaaattcatcttagctgacacaacttcttcatgatgttgtgaggaacaatgaaaaaataattgtaaagtatctagcatagagtaggtgacaaaacaatgctatcaatgaattgttattattagtattatttttagtatgatctgatgatgccagaaatatcaatgaatttaaaaataagttacttagtacagcctgaatgttttattataaagattactgttttcaatatcaggtatactatttggcacatagcaaatattcaatgattgtatttttctttgacattatggaatatatgctacatacgaaataatatatataaatatatgtaatgtaacaggaaattatcaataacattggcagcatctgtgagccccttcctaccccatctctctttcttcttcatacttcccttgcagagaaaccaatatcaggttttaaaagccatttttaaccagcggtcatcactctggaggaggtaaatttctatatactgcaggtatatgattgtttttcctattctattggaagacttttgttacctccggttttgttgtttgttcagagcttgagatattaagccttaaaataaaatctcaaatactctcattggctggtgggtttagagccactttagaaaatccagaaccacaactgagacaaagctactaaaaccctgctagcaccacctttctgttagattcagctgatctgtctgagtgatgggttaagtttctccatcccagagatattatccggcatttgggtttcaagaggctttcttactgcatgcaaagtagaattgatgggtaagggactagcaaggaaagtgtcgactgttcaaaatgtcaatacatgtgaaagattttctttggataaacattaatatggcaaattttaccttcgaggaatgaaaaggtagtagtaccatgtaaagccttcctagctgtgccttatttgtctgagaaggcaagtgcaataatatagttgtttataaagtgggttcagaagctttttcctaagtttgaatctggcactgtagctaaccagacatggaccttgggcaagttatttaaccttgcatggctcagtttattaaaaggggttaatcacagtatctgtctcatagaggagtcatgtgttagtccattcttgcattgctataaagaatactcgagactgggtaatttataagaggtttaattggttcatggttctgcaggctgttcatgaagcatagttctgcaatctgcttctgtgggaagcctcagggagctttactcatggcagaaggcaaagcaggagtaggcagatcacatggtgaatgcagaacaagggtgggaaggtgccacacacttaaacaaccagatctcatgagaacttactatcttgagagcagcatacctcactctgaaactaagacctctaagccagcagaacataatgtcatgggaatatgaagcaaaaatgttgctagtggctcactaggggtaattgtgagtggtgtcccttctactttcacccattgattcctggacctatgaatcctacctatgggagaaacagtaccatatactagatgctgattcagagcatatacagccttctggggaacttttccctagccctgcaaagtattgtcacctggttggcattgtaattatgacttcaaatagccattctattgttctctcaagccagctgcttcaggatcaaggggagcatggtaagaccagtgaacgccatgatcacgaatgcattgccgcatttctgtctgtagagtgagttccttggtcaaaagcaatgctatgtgtaataccatggcagtcgacaaggcagttctgcaagtccatggatggtactcttggcagaagaattgcatgtaggaaaggcaaatccatatcctgagtaagaatattccagtaagaacaaatcctgtcccttccataatggaagtggtccaatgtaatcaacctgccacaggtagctggctgaacaccccaaggaacagtgccatatagagggctcattgctggtctctgctgctggcagacagggcagtcagcgatggcagtagccagatcagcctttgtgagtggacgtccatgttgctgagcccatgaataacctccttctctgacaccatggcaactgtgttcataagtccattgtgtgatgacaggagtggttggggaaagagcctgaatggtgtcaacagagtgggtcatcatatccacttgattattaaaatcctcctctccaaggtcatcctttgctgagtgtacacaggggacacaaatatcttcagtttttggccactcaggtccatccacatatctcttcccaaaaatttctttgtcaccaattttctttttttttaacttttattttaggtttgggggtgcaagtgaaggtttgtcacataggtaaacacatatcatgagggtttgttgtacatattatttcatcacccaggtattaagcccagtacccaatagttatcttttctgctcctctccctcttcccaccctcccgcctcaagtagactccagtgtttgttgtttccttctctgtgtcaccaattttcttttaaatttaattgtattttaacttctgggatacatgtgcaggatgtgcgggtttgttacataggtaaatgtgtgccatagtgtctggctgcacctatcaacccatcactaggtattaagtcttgcatgcattatctattctttctgatgctctctcttgccccatccccgctgcaggccccagtgtgtgttgttccccaccctgtgtccatgtgttctcattgttcagctcccacttttaagtgagaacatgtggtgtttgattttctgttcctgttttagtttgctgaggataatgacttccagctccatccatgttcctgcaaaggaaaaggacatgatctcattcctttttatggctgaatactattccatggtgtatatgtaccacattttctttatccagtctatcattgatgggcatttgtgttgattccatgtctttgctattgtgaatagtgctgcagtgaacatcctagtgcatgtatctttacaacagaatgatttatattcctttgtgtatatacccagtaatgagattgctgggtcaaatagtatttctgcctcctaggtctgtaaggaatcgccacactggcttctacaatgggtaaactaatttacattcccaccaatagtgtaaaagcattcctatttctccacagccttgccagcatctgttgtttcttgactttttaataattgccattctgactggtgtgagatgatatctcattgtggttttgatccgcatttctttaatgatcagtgatgttgagctttttttcgtatgtttgttgatcacatgtatgtcttcttttgagaagtggctattcatgttctttgtccactttttaattgggttgtttgtttttttttcttgtaaatttgtttaagttccttgtagattctaggtattagacttttgtcagacggatagattgcaaaaatctcccattctgtagattatctgttcactctgatgatagtttattttgctgtgcagaagctctttaattagatcccatttgtcaatttttgcttttgttgcaactgcttttgacattttcatcatgaaatctttgcccatgactatgtcctgactgatattacctagattttcttctagggttttgatcattttgggttttacatttaagtctttaatccatcttgagttaatttttgtataaggaaaggatccagtttcaattttctacatatggctagccacttctcccagcaccatttattaaatagggaatcctttccccattgcttgctttttgtcaggtttgttggaggtcagatggttgtagatgcgtggtcttatttctgagatctctattctgttccattggtctatgtgtctgtttttgtactggtactctgctgttttgttactgtagtcttgtagtacagtttgaagttggatggcgtgattcctccagctttattctttttgtttaggattgtcttggctatacgggctcttttttggttccatatgaattttaaagtagttttttctaattctgtgaagaatgttaatggtagtttagtgggaatagcattgaatctataggcagtatggccattttcacgatattgattcttcctatcaatgagtatggtatgttttttcatttgtttgtgtcctctctgatttccttgaacagtggtttgtagttctctttgaagagggccttcacttcccttgttaactgtattcctaggtattttattctctttgtagcaattgtgaatgggacttcattcatgatttggctctctgcttgtctattgttctgtgtcatcaattttctaatcatattccttccaagtccctgatcatccagccaaaccattggctacagcccatgtatatacctgcatgtctggctacatcttcttctaagcagagcgcacaaccacatgcattgcttgaagttctccccactgggaagattttcctttaccactgtccttcaggcatgtcccagagaggtcctatagtgctgcagctgtctacttttggttggtgccacatatcatgcagagccatttgtaaaccatgccctcgtctcttcctctgtcaaccaatcacaggaaactccccataaggccataggtacaggctgggagacagaaggcagggtagcaggagtggagaccatgggcatttaagctacttcttcatgtaacttatttgtgttctcacaacctgctcaaccctgatcacgtacataccacttctctttgatgatggaatactgcagtgcacacccaattttgtcttgatgggtcagaaagcacccagttcatgatagccagttcaggtcacatacaaatttggtgatctgtagtcaaatattcagtttctaccaaggcccagtagcaggccaaagctgtctctcaaaaggagttgtcgaccaggagcggtggctcaagcctgtaatcccagcactttgggaggccgaggcgtgtggatcacgaggtcaggagatcgagactatcctggccaatatggtgaaacaccatctctactaaaaatacaaaaattagctgggcatggtggtgcgcaactgtagtctcagctacttagggggctgaggcagaagaattgtttgaacctgggaggtggaggttgcagtgagccaagatcacgccactgcattccagcctggcaacagagtgagactctgtctcaaagaaaaaaaaaaaaaggagttatctgcagaagatgatagagccttgctctagaatcctaaagggcgggctcaactatgattcacctatgaggacctcccaaaggctcccgacagcatccctatttgccactgatacctcacgcaccactagatctgctgagtcatatggccccagaggtacagcagcttgcacagtagtttagacctgttgcagagacttctggtctgggccccactcaaaactagatgcctttcaggtcactcaacaaatgggccagcacaccccaaaacaatactttaccagccatctaggcatccctcaatccagtcaagttgacacctaatactgaccatcatagattgtgagacttcagtgagttaaaaaaaagtgagttaaaaaatgcctggcatacagaaatgttaaatcaacattagttattattacttgagtatcaaaaatcttaaacatgaatgcagaaagatttgaattatcacaaaaatgaaaacaagcaattttagaagctatatagccctttaatttttcccagttaatttatattgagaattgataatggttgggaagttctagaaatgtccaagaccccaaaaccaactcaatataagcaaatgtgagccagtgttttggtaacttgcaaaaaactttacctagaattgaaatatcttcaacatttcaccaagaaagccaatttctcctttaaaagcagttacgtgattacatcaaaacactatacaacttaaacttttctttgtgacctgaacccaaatttagctcattattttagatatctagatatctatatcattttctatttgtaattattcctcagtctttttcagtcttttcctgtttctgaagtaaaaatattgcagtcttcaattcttcaaaaatttgctgttattgaagtacggaagccagtaaaggtcaagctatctagtaatctttaaattccaagatatttttacaattaaaaaatttcattctttaaaaagtatgccacgcagacaagaaaatgctattttagccttaaaatattagcataaaatacatgtaaaattcttgccaagaaagtagacatcaaatgttaatcatattcaaaagctaagagtcaataatcttttaacagaacatcaagaggcaagctgcctgaaatatttttttttgtggaacaaagcagaaaataaataaataaaaaccttgttaatctctctcttaggtagataattctccaactttgagccgatttttagaatagcattacaaaagtcactttcttcaattctttcttttattttttgattgtgtctcaatttttctgtatatcagcttggggtaattgaatatatttttctacccattgattataaaaaccctattagaatttaaacatatttacatattttaaatgatcattttgtcaattgtaaaaggaataagtttccattcttcattatttttgattcaggaacacgcactttttgtgggctcatgggagagtaataaatcacgcttagtaaaacaaagctgtctgggcaaaacaattttttaaaataaatcccagtaataaaagttgagaaatagctgatgaaaacagatgtattctttgttttatatgaatcttaaattttgtaacatgttaaaaattaaggataagttggatttagttcaggtctatgcatttggcacagaatgctaaagtaaaccccacccttgagaaaaaaagcaaggtataattttttaattatgaaacaattatggctaaagttaagtgtggaacttagtatatctttcccaaaaagatgtttgaatgaaattgacttaggatttaaaatagaaatcagaggatatgagaggtagcttaactttatgctatgctatttgagacaataaattatggtctttagtttgaattttttaaagggcagaaaacttgacatggtctgctgtcaaataagtttttttcaatttcaaattatttttccctaaatggcattcaatgtggccatgtatgtgtttaaaaacccaaatccccctccatttgtgctaagagtttattttccagcattttttttgttgcactgaccccaaataattacagaatcttaaagcttatggaagtctatctaattttagcttcaaacatagtattattttatgaattgataaaagatttagaggttctatagtttggatttactctctaaaaactaggggcttgggaacttagcctcttaaagttaaatcttttgtgtgggctcaagggacccagaatgaattatacttagccacattttcttctcccaccatgccatagtcccctcatgtaaatgacctctcactgataatcctgaacaatggccccactatttcttttgcttcaattaaacaaactttttgaaagaccactggggactttagaattgaaaaatttctagagaactcaaagaaacagcccatctttaattacacaatatctgtttagtaaatgaggtgcaatctccgagtgaaagagaaaagtaaccacaggccttctggcccaatcatggaaatcattttgaagaatgatgcctattatgggtccaaaaagaaagaaaatagaaataaaaagagaaaggctgattgtatttgaactttttgccaggaaaaaagtatatgcttttagctcattagaaaaaggaacaatatggtaagatttaactcagttgaactatacatcagctacaattgaactttccataatttactcattacatgacataatttactcattagataattagatgcaaggtgcctatttttctttgcacctacttattttcaaaacaaatagccaggatgttttattcatggtagttgagatgtaacacccaaaatacaggttagacagaaagatttgggtatatttcattacttatagagaagaataaaatggaaaaatgcattttgcaaaagtgtaaaccttgccttggattggtgatttccttagctagggaaagtttgatgtagtaataatttctctggtaccttacccaccaaaccttctaacactccctattttagttcaaggatttttccttaattttttttttttttggtttcgcagcaactgtgattccttgtgaactgccttaactgctttctagaagtaagcagagaatgaacaagtgaataaatgaatggaagcaaatttcagttaatagaatggggttgtgaagatacccctagttaggatgtctgcagaagaaaaagtccgaaatatgcttgcctggagaaaaccatcagtttccaaatttgtttccactcatttgtagctcccctttatgtaaatggtggaaatagagtaaaacagtttaggacttttagatagggttatgttgagatcttaacaatggtttaatcttgccatttttcaatagaagaacagaagagtcacttcactgtatctatagtgcctattatgtacattgtatgggatgctcaaatccatgcatcttgcctttgaggttattctcacttcataagatgagggaaggtagaattgtttccttcagggaacatttgtaacttttgctgttgcccctctatcactctcttaccccctagctttattttgtatttactagccaagaaggaggagttggtagacaaacagtgctttagaaatgtgtagctgtcatggagaaggtgggctctggaaactcttctggatgaagaaaggaagatttgaatgagataggagcccttattgtgggagaatgctgcctaaagcggaaggaagtttgccctcttaaagcagaaggcagcagaaggaagagctggagagaatgtagacaggagtaggagtttagtctaatccagagatttaaaaaatcaaccacacatagtaaatagagatttcaatgaagcaagatggttagaaaggtttattttctacttttctgagtgaattgttagatgtttagacctttataggatctatactgcactgaaggttgggaaacattacccagaccactttcatttactcatcaacagttatggaaacatttattttctatttatctcatatttattaatcttaaaaagcaataaataattattcatttactttattacttagcaagaaataaactgatgtcaagataccctctcagtgtaatttcttacatgttatctacatgaatacacgtagatgacagcaaccatctggttaatattatgatctatacctgtgaacattttagtgtgatagtgtattgttgctaagccaactgttagatgcatattttcttagagggcttcagctctgttcatgtaaaccagtaccaagttcctaagccctactcactacaaaataaattcaggctttacttttttgataaataatgaagaaggctgaaatgtaaatataatttcaagacagtatagttagtcatggctttgcaacaaaattcatctacttccaattactctcctcatatattttgagagtacaattgttacacgattttacatcatagtgataatacctctgtgtcaaatcctatagggagttctgggaatgctttcagatcctacttgagctacaaaaaaaaatcaaataacattaaaaaataaaaacaagaacttaagcaatagaaaagacttgtacatacccacctgtgatattccgtgtaaaccattatttaggaacaccctctccctttatacaggagtggggatggagtgaggaattctaagaatattacacaaaagtgtcaatgcatcacaatttttgcctattaaaggatcttttttttcttttattttattgtgatactggaatatagtggcacaatcatagctcactgccttgaactcctgggctcgagtgagtaaagtatcatttctaagtgaataaaaaagcccctttttatagcagagggattggattttatttaactttgcacttgcatacagtgccttgcatacagcaggtgtgtgataaatattcataaactgtattgtaggtaatgcatgatatttcctgacttcatgtatatactgacattgtcaaagattatgactgttaaaggttactgattatttacataaaaacaagtgggtcttgcaaagaaaattgggtatagctgtgtgtgtgtctggaaacatatatgcatcaagcaggtagtatatatgcgggcatgtctagactccctcaggttctatagcagataaatcctgtagggcctggatcctcaggagcagtactacttacactttcatgtgcatacacaccacctgggcatcttgttcaattatggattctgatttaagtttctgagtaacactcaatgctgctggtccggacactttggggaccacatgggatggagaccgacagatcctgaaaaaccagtatccataactgttgactggaacccaatgtctctagttttcctgacctcctcaaacacaacctgccatgtcatcagatgccatctactagtacaagacactgatggtcagccaagtttcagtctctatggaacagttagttggcaagtacctgtgagccacctgctatgagctaattacttgagggggggttatgccagggccacgaggaggtataaggtatggttccttccttcagagtgcttatggtgggttgggagtgtgtgtattcatgcactaaataaatgaaaagcaaatgcaaccagaaaaccatcagatgctaaactctgtgttatagatgtatgttctcaaatattcacagcagggcagattgcaatggcttgggaaagtcctagaaatgtctttgtcttggattggggtttccagaaacagacagaccctgagatgatttaagtgcaaatcatttatttgaaaacttcaggaaaccaataggggaacagaagagtgagaaagagaagggaaacagctcaaaaagtagcctgggaaattctagggagagtttatttcatttgaggggtaaaggagttttggaagtttacaaaacaccaactcccatcactggttgtaggatgccatgggacagcattcattcctcacatgcatacgccatgtgtcttagcagaatggcttgtgaagttggggaagccataggcaaagaaatgcaaatactggctgttggaaatagttggaagtcaagtgatttcagtctgagggctacaggcagggcaaggacctgctatcatcttaaaagagcagcaggagttgagctggaattagcaactgcttcgtcctcttcaactcacctgctgccaatgcccagttgtcctttctggtgaatctgagatttgttcacttgttaggctcatggctagaaagggcacttactaagtggtggcttcctgtctttcttgaggcaggcacctacttccctcacagacaccagtgtaggaaagtcagatcgtcctcctctggaaggaggaagatcaagtctgcggggaccaggctgccgatttctggagtttgatcctggtcttgcagacactccttctatgtgcagccatgttatgggacttgccaaactgtcccagctcacagggaactgcaggtcttctgtggatttggtcagttggcccaaattacagttaataattacaagacattgttgaaaatttttgcaacatgtaacttttgtaaccattatttactactctacatttgcaagtattttgggaactgtttgtcctttcgccagctctttagtttcttgggaacgctaaggtacataggattacatttacttatccgcactatgaagggaaataaagtactgttcctagaatcagctgagagaaggaagaaaacaggaactatctgctaatcaatatggaattttcataatctgaccccagcccactgtccagccgcatctctccccctcccctccattattcatcctatgctccaagcacttgaaatgcttcatggtttctagaagactcacagccttttcctggctgactgccactgaatgcggtgacttccccatggataccttcttcctattcccctgacataaccctatcatcttacaagccaaacttataatgctctcctaaaactcccccacatggggttagtttcttccttcctggtccagttcaaaattcagtaacagcaagtaccaaattaaattccaattatctgtctttacatcttcctcatccccagttgtgagatcctctagggcagggaccatgtctttctctcctctgtgtccccatcaccagtactgggtcttacagttagaaagaatcagcagctccaccctatatcactgagggagagaggatatgcaacatcaatactcttatttgaaagtatattttgtatgtactcaaagtttgcctttgttttccttatactttgtaagaggtttattactaatattatttacagttaacatgtaccctttttaacaatacaaacaaaaataaaagctattttcattttggaaaaaaatccttccccaattcatgacagttttataatattaagtagcagccactggcaccaaccaaggtttaagaaaatgtatccccaaagtcattgaacctaccaatgttttaactaagtttatcatccctggggaaattgtgcttttaagtcacaggtccttcctcttgtagaacggaccccagattttttttagtcttgatttgtaatttaaaggtgtaaatcatccacccagctcccatttctcaggatgttattcaacagccaggatgaggacagtaatgtggctctcagctgcctttgtcattcttttccttttcctcctgaaagtgtttttgtaggcctgccggatgtcacagaaatgcaacctgggcaagatgtgtgtcacttctttacttgaaaagtgtccatgactctgagcccagagaggatgtaatgaacacgccctggtgcttggccagcatattccagctagttagaaaaacaaggcagagggcacaggatttaacacacacgatggcagtggctgcactcaggggcatgctatttgattcttcacagatgcgggctattggtctgtagtgaaggaaaaacaagtggccatagcatccttccacgtgctatgagatcatttgtaaaaaaaattttaaagcatcttgtctctgtttctaccactaggtctactgccttgtaggtctggcacagaggaggggcatggtaatgaagtgcatgctacatactggtatgtgctttccaataagaccagaccctaaagtaaagtaaagatgactattaaactaaaatttgtttcagttcacttatttgaggcttaaatagatggaaagatacatgaattcaagttggcctcccaaaaaaaaaaaaaaaatcaatgccattcctaaagtgttctcttttccaagttgacccatgttaggaaagagggctataataacgataatacctaacaagtgagcagagaccacttgcgtggctaagagagtctaattagggaaggaaataatgaaaaagtaaaaccctctaaagtggaaacaaacattctattttggtcctctgtggacgagaaacatcaacctagtttgggtttaacttaaaccacttcatatttagtttaagagtttttaaaaaattgctgcaaacttatttgagctgtttatatagctggggaggtggggaccacctaccctttatggaaagcaatgtacttccagtggcccaagaaaacaaggcctattttaaattatgaaggtttacaaaatgaggtttattatttttgttatccttatttctcccacgaatggtggtctgcgatacaaatgtaaaacagatatacattccaccccgaggaataaaaatttacatacaccagttatttcctaaaaaagaaaaattgtgtagccagctatgctttccacctttaatgtacatgtggttgtctacggtgcctcattccaattctgtctcctgattttgactggtcccacatatgcctacccattcagctgctttccttggagaagcagaggcaaggtaagccatttccctagttttcacctccctaatttcagtctgttagggtcaagttttagcctgtatacaaataagtgcaatgagaaagacttggacaatgctgagtaaagtaataaagtgctggcatttatcaaatgtttactatttgctaaatactgttccacatgggttaactcattaaatcctcacaacaaacctaagaggtgaataatattcccattttacagatgaggaaactgagtcaagagaggtgatgtaagttgcccatagctggtgagtggctgagtcaggactgaaatcaaggcaggctgactctaagcacaccctcttagtcaccgtgttacttttgccctcatcgtaagcaaatccattcatgtaatggattcttgcacagagagttccttggtggtgatcactgctcagtctacagtggtgagtgctccttcttggagctgtacttcaaccaatttgcagcctgctgaggcctcgtatatgaaaatctctttataatctactcagtatcatctttcatttatgtcacctcctagcagccattatggatggccttggctcatcacatgtttgttgtataatgactccatattcccctgtcaactttattctcatctttcacctgctagatatcagagatagattgtataagctcagaagtatacagccctctccacactaatatttcctcctcctctctcttaagttataattatgtcatctagaataagtagacagacttgatggaatcaaagttcaagtgagaaatcaaccctcaaattcttaattaccagtattctcaagtactcattcagtcttatggccacagatgaattcagatggatttgataatatttatttcccctggaagctgagaggtatagggaggagaaaaagacattaacctgcaaattgcaacacgacataattgagatacaaccatgacacatttaaggtacaaccaaattactatggaagtatagactgggagtgactaactttgcctaaggggactgggaagaactcacagaagaggcaacatttgagctgggtcaggtaagataagtaggagaagagggtaaaagctatccaggcagaataagctgtgaaggtctcaacgtatgtcagagtaaagggtgtgcagggaagggtgtaaaatcctgagtagtcagaatgtaggggaatgaagtagactggacaggtaagaggtgaagctacagaaggaagctggggccatgccaaggagtttgcataataacccataggcagtggatgagaccacagaagactttgtgtgaggaagtacactcacacttgtatttttccctctctcgttggcctctccagctagacaggtttcgtttattatattgctgctgttactttgttgttgttagttgaaatccatcaagcatttttttttaatatgccaggaactgtgttaagtgttttatataaactgctggatggttgtttggggaatgaacccttaggtgctactaagaagtcatttctgctcttgtctgaaaggtttccactgcaaccttctcatttgagaaagacaaaatgacccatgtatttttgctgtgttttggacatatttaatcaaatactatttcttatttatgaatttacttcaactgagcataccagagaaatggagcaaatcctggcattataaagaactggatagatctttactgaaaggtgcacctcaagggcaacaattgatcggttctcccagaagcaaatttctctaccctggaagtgttctgtgagtcattcatggcctccacagtgacacaagcactatatgattattaaacatggctttatttaagtttgggcaaaaagatttctgagttaatctgggagatagagaaaataagaatctgtaggattttggtttttgttttatatatacaactcttctctgccgaatgtaatatagatggaaaaattgtgatgctgctatcaagctgttgaaaacagtctgctcacccagatgggcactcatttgaaagacaggcacaccctgtcatttcccagtagccagccctgcagttcttacacctggctttatgcaagcacagaaggtgaggcataagccaatcaataacttgtgtgattccaggccgtctctacccccatggccaaattctggactgaagattgcaaacccacaggagactctgctcttcttaaagatcaaaccatggagtttgctggaaaccagaaaacaaaggaggtatgctctgataagtcatagattgtatattatatgctctgatcagtcagtatgctctgatcagtcagagattgtacattacaaaagttggagcaggatctcaaagttggattggcttttctgtatttccaaaatcttttaaatcctggaaataaaattatctgacagtttgaacccctaaacccaacagacaggaccactttggtgtcaaagagaaaaatttcaaatggagtcaatttttagatgagaccagaataggataagggagacgatcctaaggctagaggtcacaagggtcctgtggctgtcttacaagcacccccaaaatccccatgccttatatggtcccatgtttcattgtctccccatagaccaagctttccacatagaaagtggtggggcttttccagggcagtttttgcctttctttctttgttgacatttcctttcactttggtacccaagaccccatactgggcatctgccttcatgcccacctctcaatgtacctcaggaacttcttgtttctttttggaaagaggctgggtagagatatacacacatgcacatcttgcctattgtctttggtctttagaaatattgctccacaaggttttatttagaaagttggacaaatttactcaaattactctgttactagctgcttagattactacacttattcttgggacatctgaaatttagcattctttatggctaaaataactttcttacagtaatatttcaggcattacaaataatcaagaaagagcattatttctgagcaaaggagcctgcctgacatttataggtaattttattagactgatcctaaataaaatggaaaaatggaatcaaataatatcagagcatacgggaggtaatccagtgtaaagccattaatttttgaggagagaaaacagatccacaaatgtgaaatgaattgaccacctgcaacagcaacagctgtttgttcttcatcattctttctacctttgtcccctgtttaactgggcatgggaccacccaaatccaggtgacatgctccagtctgccttgcagctacacgtggtcatattcagctttagtctatttagctaatggattgtaaacaaaaggttgtgtttgatggcctggaagattccttctccccttcccccttcctgctggctgaaagactgatgcaatgggtggagacagtgtcatcttggaccatgagacagaagctattgctttctggtgcactcaggaatggtagagcaataaggtagaaggagcctgggtctctgaaacatggcactctagagagattgccttctagacttcgttatgtgtaagagaatcagatatctgtctttgtttaagttattgtggttttggatttttgtgttactcttagccaatgctactctaagctgctatatcaatagtctagaaaattattaaattaattagcaatggcttgatggaggagggcaggatgatgggtgatgggcaaggcctgattctaaatctaagagagaaagcaccttaaatattctctgtctggagttcccaaatactgatccacaaatagctgcgtcagaattaccctggcacaggttcccgtaaatccagacttctggtactcttttcaggagattatgacttagtaggcattctatgggatccaagactgacattatttaaaagctcctcacgtaatcctgatatccagatatacttggtaattatctgatctacaattgttctctgctatgggtcccaggaaggggggtgaatcagaaccaccagaaagatttgtttgttttgggggaaaaagcaaacaaatttgaactgtgaaataatttattcctcaggctatttagatccacctctccttctcctggtacccactgagagtcatacaagtgtcaccaaatgaactgttctctttcaggttagcctttgatatggtttggatctgtgttgccacccaaatctcatgttgatttgtaatcctcaatgttggaggtgaggcctggtgggaggtgactcgatcacgagggtggatttcccccttgctgctgctctcatgatagtgagtgagtgctcatgagatgtggggtagcacctcacccctctctcttcctcctgctctggccatgaggtgccttcttcccctttgccttccaccatgattgtaggttttcctgaggcctccccaaaagctgagcagatgccagcatcatgcttcctgttgcagcctttggaagtgcaagccaattaaacctcttttctttataaattacccagtcccaggtatttccttataacagtgcaagaatagatggatacagccttagttcagacaaactgacagttacttaattgcatatggttatactgcatgtggctactgttttttgtttttcacagattacatcttccatgggagtttagtcaacaccagtgtgcattactatacattaatgaatcatttgtgacaaaaagaattaccattaaattgcagaaagagttcactttttaaagatttgatggcctcacacctcagaggttgaattttttggttcttgcaaagatctgcaaggtcagcagattcagttaaacagctgtcaggcaaagttggcctaataacactcaggcataccagtgggttctcttggcagaaaaggtgacaagcaagggaaagcattaacagaaggcagagtgtggtgaggcattcccaacagcagtgcatagaaagggattatactaagagtacatctacaccagagaaatcccctttgaagatccatcctcacattgacaggtgcaggcttgggaactcagttctcccgccctcctctgggaagctagaggagaaagagcctcacccaggaggaagccaggcaggactcaaggggttcactataattctcagaagaaatataatcaaacagcaccaaagatgcattttaagacaaaattcgaaaatggattctgaagataccaaagatctaattctaactgggttactcactcaatctgagtttgggtaagtcacataatgtttctgtttttaattttgtcttatgcagaatcaagggattgaactcaatgaactatgaaattccttttaaaagttggacaattttatacttattgaatagctaattatattatatataaatgggttcaaggaaaagctctcagtcaattatagatttgtttttattttaatatataaaaatcctaaatcccaacatgaaatcatcagagagacatgcatgtctttgaaacctgaatttctgaaaactttcttaatccccataaactctgatggcatcctgttgtccctactgaaagatgccattatgcaaatatttagcctagtacttttaaacatccacaaacgtttatttcactctcccaaataacattcagaggactgaaaacattctgaacccaggcacttattgacatgatagctatgggctctcattaaagggtagtctatgaaatctaattctgtgcttactgatggtctcctgggttaagagaaattgcaacctgaaatgagatacagctcttttattggttgttgttactgcaaagtggtcttgaatctttcagtgctctctccattttaaccctccttcttcaggtgacacagcagcaataaaagactcacttcctaaaccttccacataaccctgctacttgattcagaggccattgtccatgtaaaaggactgaaagagaaattgggactcccagaaatcccaggacaaatttgtatgtcatagaactcccagaaatcccaggacaaatttgtatgtcaaagagaaattggaactcccagaaattccaggacaaatttgcacgtcataataatccaacctattaaataggttggattaagtgccagtgcaattcaggggaatggagagaaaaaagccaaacttacttcatccacatgcccaacagctccataaatccttgccatctgtccagtgaggtaggggaatctctcaccaatctctttcagcattggaagaaaactgttcaaagccactggctcatagactgctatctctatgaggatgtttaggatgatgtcattatgggttgaatccttcaaatgcccaattaggaaaggaatacacttctgaactacctataaagagagaggagaggaggagggaagaaagaaggaagaaagagaaaagttaattaaattggaattaattttgaaagcaaactttttttgcattaaacctgaactcaacacattctgggattattaccctccttggtactcaggcaaatctcccaagtttagaatttaaaatttacaataaaatcttcagagcctttagttccttttccttttaatctgtgatttgctgttgaagagtgaagtttaaaataatgcttcagtgttactattcataaatcaagttttgatgtgttatttcctcattgggaatgctacatttcctccaaccaccatgaaagctgcaatttaaaggacaatttaagtaggtaggagatctttgttgactttaatcaaagccttcaaaatggagaaatccagtttagaaatgtttaataaataaaaataagaaagcagaaaagatctcccacattttcttcaattttccattttgatcacaaaaatgtaataataagataaaattattaaagcaaaatgatttataccatagtcacattatcttaatattttttcttgattcttaatgcttatatgaatgtaaaggtgaaatttatctgagaaaatggaattcttttgtggaataaagactctatgttaatacatcacatattgataatttgatgaattgttttgttggctaaaatagaagaactagaaagggaaacctgtgggaaactgaacaacaaaagtgaaacagatttgcccatccatatttctgtttgtttgtttcttttgtttgtgttttatttactttattgatttgtcattttttgagtagggtagactttaaatgtagcttccagtattaaaaccaaatctgatacacagcaccatctgcccaaagttgaactcataatccaccccctgccaaaaacctgcttctcccaccaccccttctggccctaagtgcctccttttctcataaatgacaccattatccacctggctactcaaactagaaactgtttctcccttaccagcagctgttatccaagcaatcatcatgtcctgttgattccaatgcccaagaatcccacagatctgttcactcccttctctttatatttatccattaattcactcattcacaaatactgattgagtccttcctatttgcaagctgtaggtgatggggatagcaataagtctgaaaagattcactgtttagtaaaggagacattcagtaaaagaaataatcacatcagaaatgaacaattataaattttaataaatcccatacagggaaaatgtagggctctgtgaaagactgtcctagggctctaatttaggcaaaggttcagggaaggcctctctcagcgggacatggagctgagatcactgacccaggcatcccacacatgggttattccaacagcctcctaacaggtctccctgtcttcagtcttgcccatccaatctcttctcagctttagccacaatggtgttttttcctgccttaaaaccctacagtcacttgcccttttttgtatacctgactcctatccatcttcccacattcagtctcttgcccacttggtccaccttcccgcagtccagttcccactacacatcacacatcaattatgatgaattttttttaaaaattcttaacttgctaaattttcttttgcagctgggattttactcatgtgatttattctgcctggaattcttgttgcccctattttgcttgagtagctcctgatcattcttgaggcctcagatgaactgttatttccttaagaaacctccctcagctcctctcctcttccttctcagtctatagtgcccttgtggaagctcccagtgtaccctaagtggccctgagcaggtccttcacatgcttccttcttactgctgctctagatgcctttcaggctggattgaaagctccacaaggtaaagaatcatccctatcttgtacactattggatacctaatgccttatacagagcttatccacaagttgagttaataagtttttgagcaataaatcaaaggaaggtaagtgtaatttatatagagtgacatctgaataaaacatctcccccaccctatagtagttaaagagttgtacacaatgtttaaacatatactgtcatgtattactacaaaacaactaacaagaacataaaagaagaaagtttctagataactaaaattatcctatatagagatttaaactttagattcatatccagtacttttggaggaaataaagggctagattctggtaaatggcatatatgaatgcacagttctacaaatgctgcctgtgcattagggagcaattgtatgtccttcaggagaagccatgcgaggtccctggcatatatggcagaagtgtcagccagctgctccaggtcagggcaacatacttaacctcatgtttttagcaatgaaaaatgcttgcacatttcctgccccattctataaagtttcatttgccagtccttactcttcaggtcctgtttcctgaacaccaaggtctttgtgacatgtgcttctagtcatgtcacttttactttaaaatttaaactccagtgatacgtcccaagctacacagcatgggttttagctgttgtcctgtaaagaacaattaaaaaggaaagaaaaagaaaaaatgaaggaaggaagagaaataaagaaagagagaaaggaaagagaaaaaggaaagaaagaaataaagaaagaaaagaaagagagaaagagaaagaaagacagacagacagaaagaaagaaagagaaaggaaggacggaaggagaaagagaaagaaagaagagagaaaaggaaagaaagaagctcaaggcaaatacatacacctgggcatagttgaatccatagaaagagcaagggaagtgaagccctgaacaatgtaaactaaataataacaattttacaaattaaacaaaagttgtttttttttttactctgaattcctaatagcctaaagcttgttatgataatgatagaaaacacaggtatttcttgaaatttatccacacatgagaaacaagtctgctttgggctttagatagattattcttggattagaaggaattttattttccaaacatagggcatttccttaggctggtgtcttcagtgcttcctcattgggagccgccttcctgactcagggaatgctgtgctttgctgagagccaagtagccactaagaatatagattctggctgcagagaacaagctgacatggactttgttcaggctgtaaaccatggacagctgaaaaagctaccaaactggccttcttgcctcaagtctctgtcccttctgttcaggctcctcactgccaccagagtcatagcccttaaactccgatctaattacctcaggtctctcttagagactttcaaaaatttctcatggcccatggccaaaattccaatgctgtggtattccagattccagtgtcttttttgatgggcctatctgcagactcttcccccatgacccagctacatggcactgatcactcacagtggcttgaacacagagagaaatctcatactttcaaattcgatctcaaatctctacttcttggaagtcttctttccagcccaccataacaaatgcaggacctgacactagggtacaagcagaggcccttacaccacaaatattcagctgctatataaaatgttctatcctcctccctgacaaatgtgcctttataacaatctgtgatgcttgatttgaatttagaatgtttggactctgtagagaaaacagggagagatgtctctcagcccccattccttgccccatcccttctcttctatttctacccctggctttgccctgcatgtgaacaccccagtccacatatgcaagctcttctaggccacctctcaagaatatggggtcaactgtcggcatggcttgttctcaggagaatagacccaaggacgaagtcttcacaagctctggaagcaggtttgagatacctgggaaaggaattccaagatctcagttacctgaactgagtttagtgggcaaaggagtggatgggaactaagggtgcaagtaaaggagggcccaaacagaatgctctaaaccaagtagcccagggtagggcagcaaccctgaattccctggtttttcctgaatagagttagtcacttcctcttctgtgctcccatagcagtctattcacgagtttggcattttgtcattgaagattgatggatatatcttccagaccatgtgcaccttgaggatagggccatctgaaaacagtgccgtaacttaatttacagcaaacaacatttcaattcctctgtaaagaataaaagttttcaagcaattaaagtctcaggatacaaaatcaatatgcaaaaatcactagcattcctatataacaacagcagggaagcaaagagccaaatcatgaataaattcccattcgcaattgctgcaaagagaataaaatatcttggaatacagctaacaagggaagtgaaggacctctttaagcagaactacaaaccactgctcaagaaaatcggagaggacacaaacaaatggaaaaaacattccatgctcatagatagaaagaatcagtattgtgaaaatggccatactgcccaaaacaatttacagattcaatgctactctcattaaactaccattgaccttcacagaattagaaaagactattttaaaagtcatttggaaccaaagaagagcccaaatagccaagacgatcctaagcaaaaagaataaaactggaggcgttatactacccaacttcatactaaactacgaggctacagtaaccaaaacggcagagtactggtacaaaaacagacacatagacgaatggaacagaatagagatctcagaaataagaccacacatccacaactatctgatcttcaacaaacctgacaaaaacaagcgagggggaaaggattttctattcaataaatagtgctgggagaagtggctagccatatgcagaagactgaaataggatcccttccttacgcctcataaaaaaattaactcaagatggattgaagacttaaatgtaaaaccccaaaagatcaaaaccctaaaagaaaatcgaggcaatactattcaggacataggcacaggcaaagattcatgatgaaaacatcaaaaccaattgcaacaaaagcaaaagacaaatgggatctaattaaagagcttctgcacagcaaaagaaactatcatcagagtgaacatataatctacagaatgggagaagatttttgcaatctatccatctgacaaaggtctaatatccagaatctacaaggaacttaaacatttacaagaaaacaaacaaacatccccattaagaagtgggcaaagaacgtgaatagccactactcaaaagaagacattcatgtggccagcagacatatgaaaaaaaactcaacatccctgatcattagagaaattcaaatcaaaaccacagtgagatgctgtctcacgccagtcagaatagtgattactaaaaagtcaagaagaaatagatgctggcgaggttgtggagaaaaaggaacatttttacactattggtgggaatgtaaattagttcaaccattttggaagatagtgtggtgattcttcaaagacccagaaccagaaataccatttgacccaacaatctcattagtgggtatatacccaaaggaatataaatcattctattataaagatacttgcatgcatatgttcattgcagcaccatttgcaataccaaagacatggaatcaacccaaatacccatcaatgatagactggataaagaaaatatggcacatatataccatggactactatgcagtcataaaaaggaacaagatcatgtcctttgcaaggacatggatggagctggaagccattatcctcagcaaactaatgcagaaacagaaaaccaaacaccacatgttctcatttataagtgggaggtgaacgatgagaatacaagcatacgatatgggaggggtggaacaacacacactgggacctgttggggggctggggggagggaaagtatcaggtagaatagttaatgcatgcttggcttaatacccaggtgatgggttgatctgtgtagcaaaccacgatggcacacatttagctatgtaacaaacccgcacatcctgcccatgtaccccagaacttaaaagttgaaggagaaaaaaaaaagagcaattatgtacacacacacatacacatacacatgtgcgtgggcacacacttcctcttcaattagtcttcaggcccaattttctcttttaattactttggctagcattaagaatctactaatctctagaaatggacaaaatgactgccatttttatttactaattcctaccatactgaaaaatattatatattccaaaaaccatagttctgctctaaatttcagaacagtctacatattccagcactctgtcttcttaatgttctgcaaatgacttcttattttaaatgaataccaaaagtgacctctgagtattcttggcctcgattaggtgtgtgaataggaatgctctacactgttgagcaaaaatcctagaaaataattctctcctctagggaacagatcacaaaagcagctcctctgtgtctgaacattcatcaccggaaggcttcccttgccacttcctgtcactcattgctgtatgcttggggatagaagttaatgtcccagggataacaacagatatgcttatatgtgttactaaactctgttcctttcgttggctagactacagcatggtttacagcagccaagattatagacttgattctcataaaggccacttggaaagttgatcacccagcctttttctgtaaatggatcctgagaattctctggaggtaccagttataaattactagccaggaactgcctccttccatctggcaaggatagtgtcctgaaaagtaggatgcctagagggcagtgatggaggaaggggacccatctgctcagttagccacatcgtggagctcacagatatgtgatatgtggatgttgaagcgatgctaccttcacagtctcatggactagtcagctttatgtagagaatttttttttcaagggccaactgttgaccctccagccctggaaagccatgctatcccaggtcacagaaggtgggtagtgagaagggcattcaggacacatgaagcatccccgcacattgcccctccctagagagctcactcagtttacctccaagttacagagcatcaggaatgctttaatgcaggcagggaagctctacttgaattccagtttcacaaagtcaaaacctccttagttagcttcctatttcacctgaaatgaattaggcttaacttgaaagcttcagtctgtatttctggttgtcgccacttatttcccttctcagtaaaccctttctccacatttccttccatctcccttgctcactgtctaattaaggaaggggtgagggagaaggtgaatcaggcagtttctgtattgtaccacctgtggtgacagaccctttgaaatcaagggtgtgctctagttctaggggtgctggcagcaggaacagagcacgaagagccgagggaggcaagtggagaggctgctttaccatgaaggtaggggtgacaggaaacgggactccacaataccccattacaacttcttccccccaggtaggatcctggcatgggtggggtccatccacatcactctaggtgctccctaaaccctggcctctttgttctgggatccacactcagcacccacaatacctagcagaatgtgagttcaccctctcctcattttgtttactctccttcttttgtctagccaccctccaactgccctttctccctcaccttctcctgtatcttctggaactctcatttgcttcacaagccacagccttgattctttagtgtgttgaggtcaaaagatttcattggttggaattagactgggtttgtgttgcagcttggcctgatctatctggctttgggaaagtgacccagctagtgtgaggcccagatggttttaggatggttttagggaaggtagtatgactctgatggtcagtgggggacatgaaagttgaaaggctgataaagatgaagtgcatgtgaaaagccacctcacccaccaagtcaccctttggtaccaccactgttcttaaaaacctctccaaacattggcttctctatttataaaacaaaaagcttgttgtgggaaataaatgagatgtctgtgatacacctatatagtgcctggtatatggtatgagctcagtcactattagtgccattgtctaccctcccctgcctgctgggaccagcactgaggaaactcctcctcttgtagccttctctacagtggaagtggaagctgcccagttatttccccagttggggacctctgctctaggtgatcgagtaatccttcaactccactcctcaccccaaactctactgcagttttgctcatcctttctgtcctcaatcctttccaaaattggttctctcatttgtgctctggaatacattccccatcttcctccagcaccttgttctgtctcctatttcctctcacatcttcaatccctttattcttattgtgtctttaactctccttgttttttctaaacttcctgaattggcagtccatactcacatgatcctttcctaaccttcccttccatatgcaatccacaataaatgactgacttctcccaccctgcctcaatgatgctgccttttataaaaaagataacaactggtgagccccaattgccaaatccaaggtcaatgcctgtctcttgtcttttttacttctctagaccttgaccctgttgagccactttttcccctttggagaatacagcatgacttttcctcgttcttcatgtcttcactatttttgtctcttgttaatttgttcatttcttaattcaataactttttattagaatcctactatgtaacccagcactacaccagggagtgcatatgaatatgtagataagagtcctatgtaccttaaggagtttatagtgcactgaaagaaacagtcgtgcaaaaataacaacatattgctctatgtgcaaaagggacagtgcataccagtaacacagaattccccagtcctctgcctgagctctagccttgctcctcaaaatgttgtcccttgaagcaatagcagcagcaccatatgggtatttgtaaaaagacacagttggggtacccaattgtgtctactgaacctactgaaccaaaatccctgggagtgaggctcaggcattggtcatccttgttggtctcatctcctgaagcttcctgtgaattctgctctccaatattcaagattcccagctctgaatcatctgcataaaagtatgcattcttcaggatatggcctgatgtcacaccctttgtgggacttcatggcatctattttcctctaaagtagaattcattacccccatctctgtttatgccatttgcaaagaatttatcaccttgtttaatttgattctatgtttattgtcagtttggttctatgaatgtttattgagcactatcagatactatggaaaagtctaagatacagaggaaagaagaaatcatttcttgtcaaaggagcttgcagtctattgtggctaattatgcatataactattctttcttgcctttctttgagtaatttgtatgttgaatacaaatgttccagtcttcacttaagcattgatttttttttcaagtggtggatagtgaaactataaagaaatgggacaaccataattgaataaccttggactaacaattcatattcactgtgcacacatgttggttgatatggtttggctctgtgtcctctcccaaatcgcatgttgaattgtactcccataattcccacatgttgtgggagggacctggtgggagataatttgaataatgggggaagtttcccccaaactgttctcatggtagagaataagtctcacgagatctgatggttttatcaggggtttccacttttgcatattcctcattttctcttactgccaccatgtaagaagtgccttttgcctcctgccatgattctgaggcctccctagccatgtggaactgtaagtcgaattaaacctctttttcttcccagtcttgggtatgtctttatcagcagcatgaaaatggactaatacagtaaattggtaccagtagagtggggcgttgctgaaaagatacctgaaactgtggacgtgactttggaactgggtaacaggcagaggttggaacagtttggagggctcagaagaaaacaggaaaatgtgggaaaatttggaacttcctagagacttgttgaatagctttgaccaaaaccctgatagggatatagacaataaggtccaggctgaggtggtctcagatggagatgagaaacttgttgcaaactacagcaaaggtgacgcttgttatgttttagcaaagagactggtagcattttgcccctgccctagggatttctggaactttgaacttgagagagattattaagggtatctggcaaataaatttctaagcagcaaagcattcaagaggtgacttgggtgctgttaaggacattcagttttataagggaagcagagcataaaagtttggaaaatttgcagccaacaatgtgaaagaaaagaaaaacccattttctgaggagaaattcaagccggatgcagaaatttacataagtaacaaggagtcaaatgttaatccccaagacaatggggaaaatgtgtccagggaatttcagaggtcttcatggcagcccctcccatcacaggcccagagatctaggaagaaaaaatggtttcatgggcaaggcccagggcccccacgctgtgtgcagtctagggacttggttccctgtgtcccagacactcccacaatgactgaaaggggccaaagtacagctcgggccatgacttcagaaggtgtaaaccccaagcctttacaacttccatgtggtgttgatcctgtgggtgcacaaaagtcaagaattgaggtttgggaacctctgcctagatttcagaggctgtatggaaatgcctggatgtccagacagaagtttgctgcaggggtagggctttcatggagaacctctcctaaggcagtgcagaagggaaacgtggggtcagagcctccacacagagtccctactggggcaccagcctgtgaaagcagccaggagggaggctgtaccttgaaaagtcacaggggtggagctgcccaagaccatgggaacccttgcatcagtgtgactcggatgcgagacatggagtcaatggagatcatttcggagctttaatatttgactgccctcctggatttcagacttgcgtgggacctgtagcccctggatttggccaatttctcccatttggaacagctgtatttacccaatgcctgtatctaggaagtaaccaacttgcttttgattttacaggctcataagcagaaggcacttgccttgtcttagataagattttggactgtggatttttgtgttaatgctgaaatgagttaaaactttgggggactgctgagaaggcatggttggttttgaaatgtgaggacatgagatttggatgggccagggatgtaatgttatggtttggctcagtgtccccaccaaaatctcatcttgaattgtactcccacaatgcccaaatgttatgggagggacgcagtgggagataatttgaattatgagggtggtttctcccatactgttctcatggtagtgaataagtctcatgagatctgatggttttatcaggggtttctgcttttgcatggggttcctcattttctcttcctgccaccatgtaaggagtgccttttgcctcccgccatgattctgaggcctccccagccatgtggaactgtaagtcaaattaaacctctttttcttcccagtcttgggtatatctttatcagcagcatgaaaatggactaatacattggtaccctccagaatccatttcaaattccctcttcctggcagcctctagtttctgtctgtgtatcctccagttcaacagaagctctaggggtagagcatgcatccaaaacagacagaatatcaagacttctgttggatgttggtggcagtgatagatgtaggagaagcatagtgcgaagagagcccctagcacctatttggagatgacagggagaaagcctgtggaaaatgggagcctagaagtcaaatctgagaaatcaaaatagagaaattgtttgttcacattatttttgaaccaaacctcatctgattttttcccatcacattagctataaattcctttccttgatgaaactactgtggtttgggtgttctattactgataatcgtaaacatcctaattgttaaaatcttctacttgaatccaaagaacaataactgatttgctatctgaaaaatgaacctttgctgtcactataggctgattaattcacaaataaagttaagtgtaggtctttctcttggtcttacctgagaaactacagattcctagaactgcatgacgacattaaactttctttaacaacattctacaatagccacagattcgcaaatctgttgctttttttttttttttttttgagacagagtctcactctgtcacccaggctggagtgcagtggctcaatctcagctcactgcaacctctgccacccaggttcaagcaattctcctgcctcagcctcccaagtagatgggattacaggctcccgccactgcacctggctaatttttcttttttcttttctttttttttttttgagatagagtcttgctctgttgcccaggctggagcgcagtgctgcaatcttggctcactgcaaccttcgtctcccaagttcaagcgattctcctgcctcagcctcctgagtagctgggataacattcacgcaccaccatgcccagctagcttttgtatttttagtagaaacagggtttcacggtgttggtcctgttggttgaactcctgacctcgtgatctgcctgcctcagcctcccaaagtgctgggattacaggcgtgagccaccacacccagcctaatttttgtatttttagtagagacagggtttcaccatcttggccaggctggtcttgaactcctgaccttgtgatccaccagcctcgacctcccaaagtgctggcattacaggcgtgagccactgcacctggcccatttgttgcttttcattactgtatctgtctggttaatatttatttatttatttttaaggcaaggtctcactctgtcacccaggctggagtgcagtggcatgattttggctcactgtagcctcaacttccctggctcaggtgattctcccacctcagcctcctgagtcgctgggactacaggtgcctcctccatgccctgctaatttttgtattttttgtatagacagagtttcaccatgttgtccaggctggcctcaaactactggcctcaagtgattcacccacctcagcctcccaaaatgttgaaattacaggcaggagccaccatgctctgcctgtgatggttaattttatgtgtcaacttgactgggtcatggggcacccagatatttgattaaacattatttctgggtatgtctgtgaggattatttcagatgagattagcatttgaatgggtagactgaataaagcagattgcccctgcaatatgggtgggcctcatccaattaactgagggcccgaatagaacaaaaaggtggaggaagggagaatttactctctctgcctgattttgtgagctggaacattggtcttctcctgtcctcagactgtaacttatgccatcagctctccaattctcaggctttcagacttgaattgaaactatgccactggttttccttggcatctagctcgcagatgacagatgggacttcttagcctccataatttcatgagccagtttctcattatacaaacagagtaagtagatgagcgctttcacttaaaaaaatgggcatttgtaaatgtatgagacaggaaatcctaagcacatacgctgttcacacacaaagaaacatgcctggttgtgtgcaccatgacatatacaatgtactttttacctcgagttgttttttctttgctgctacatgcaaaagccgtagtagatggtactgttctggctgttccagctgagacatcaaggccaggagttctgtcaggtgtctattaattggctgaggctgcttttcatacacagcaggtaacactctcaacaacatggtgttacctgttgagggaacaataaagggaatgatgactttatcaggccatgagcaacagaaataacattattaccaatgtaataatatttgcacttacacattaaatagcacagactgatggccaattcttttgctaaaaataacatggtaccttattctgagattaaaatgtgatttaatccgattccacaaaaggaaatattttatgatataatcagcaccattaactaatgaaaaattttgctaagtaatgcaccatggggatagaggaactttgacagtaatcagaccacacccttgagaaggaaacagttccaataaagaattcctgatgataaacaaaatttaaacgatgtttaaatgaaaactaagcagtgctgtaatcatggacctaaatgaaactgaacaacaaaaaaagtgcaaaggaatgaattcacattcctggaagacacagaatcataatttagacaactcacatacagaaactatgccttattttatgaatagtttaagaagtagtaatgcaaatttaaatccccaatttctgcactatttcaagggaagtttagcctcagctgatttgtcacacataatttcctcaaagatatgtatagacaactagatttataatggcaaaacctcaagaaaactattacataacgtatagaaacttatctgcaatcaacatatgggcaacatctgcttatcactctatggtatagattttttttctcaaaatcctcacaagtacttaaatgtctcaggggaattggtttctagggattttttgaacaagaatttttttgactctacttttactttaaatttggctttgtatatagaagccatacacagaaagaatcaaataagaaggaattacacatatatggaccttcattaaatggtaggaacatgcctatatataaaagacaatttagatatgatcattaaagaaagaaggccagaattttcagaatatcaatatctaaatttaacgaaagcgtgattctggataaaactgaatgaattgaatgaatttgggagataataaaaaatgagaattgttttttccacatgtagttcatagaataagtctaaaacaggttttatcatgttccccagaatacaagttgttggaaatatttagagttttcttttaaaaggttgtgttcgtcagtatttattttcaatagtttaattttcaacaatttgttttgttttctgtttattttactatgagcgtctccttaaaagatcaggaattttttaatgcaatacccaatttgtaaagcccaagttagattatagaacttagttatgaggacatactgatcaactgctaaaaatggtcacattaaaagggactgtagttgcagtctaagacaggaaactgttgcatggcatttcggtacaaaactcactacagaggccctgggagccttgaagggaaaaaccccagattagtcatttttcagctgacttgaatttcaatcaaataatacaaaaaacaaatgcagaacttttgcagaaatcttataaattccattagtcaataataccttcttttaaattatgaaatagttcaagtcatcaaacaaatgtaggcaataatataaggaacattggtgtgcctaccaaccagatttgtcaaaacttaaccttatatgataattgcttttcatcccatttgtttccttttctccccagaggcaaccatcatcctaaagggagtatttatgatctccataagtatttttacactttaattacatgcgtatgtatcaataaacattatatagtattgttttggatgctttaaaattttatgtgaataccatcatactctacacatcccttcgcaacatatttttttcctattcaacattttgtaggagttatatctccaagaagctctccttcatttactctcacagccatgtgttattccagtgtataaatatgcaacaacttattcatatactctctgtgattgaaagacattatgttgtcattattattcattgccttaatcaataatgctgaaataactgtctctttgtgcaaaaatgagagatatttcttagggtagtgcttctgagtctaatgtgcttagaagtcacctgggcatatctttaaaacacagatgttgattcaacaggttggaggtagggtttgagcgtctgaatttctaacaagctctcaggtgacactgatggtccattgaccaaatagttagttaagtggcaaagcactgagtatgtccctaggagttgactttgtagatgttccaaaatttctttgtgaagcagttgtattcattttctatagctgttattagaaattatctcaaaattagtggcctaaaataacacaaatttattatcttatatttctgtagttcagaagtctgacataagtctccctaagttaaaatcaatgtgtgcccagggctgggttccttcctggatgctctaggagagaatttgtttccttggcttaaccagtgatatgctttggctccgtgtccccacctaaatctcatcttgaattgtaatcctcacgtgtcaagggagggacctggtgggaggaggttggatcataagggtagttttatccatgctgttttcatgatagtgagggagttctcatgagatctgatggtttaaaagtggcagtttccgctgtactctccctcactcctgctgccatgtaagacgtgccttgtttcccctttgctttccgccaggattgtaagtttcctgaggcctcctcagccacgtggaactgagtcaattaaacctcttttctccataaattacccagtctcaggtagtatctttatagcagtgtgaaaacagacagatacatccagcttttagaggctgcctgaatttcttggtttgtggcccctttctccatcttcacagccagcaacatggcatctctctgatccctgttccttcatctcatctctccccttgattctctcttctgcttcccttttccacttttaaggacccttgtgattgtattgggtttaactgaataatctaggattatctccctatcttatttagcaaccttaattctatctgaaatgcatattacataacatgttcacaggttccggggattagaacatggacatctttgggggaccagtattctgcctaccaccaagattatgacaatctactcccaccagcagcatgagtgtttctgttggtccacattcttgccaacatttggttgtgacagacatcagtgtttgctaatctgatgggatgtatctaatatttttgctttaattttcatttcccaattacttgttatatattatatataacaaattatatatatacatatatatataattgtttctgagatggagtctcacactgttgtctgggctggagtgcagtggcgtgatcttggctcactgcaacctccgcttcatgggttcaagtgattctcctgcctcagcctcccaaatagctgggattacaggtgcctgccaacacacccagctaatttttttgtatttttagtagagatggagtttcactatgttggccaggctggtctcaaactcctgaccttgtgatctgcccgcctcagcctctcaaagtgctgggattacaggcgtgagccaccacacccagcccttttcatatatttataggtgatttcctcacttgtgatttggccattcacattctttgcctatatgctattaggatgttgccattttttcttattaatttttagaagttccttaattattctgagctactgaatgaatttttgatttattgatttaaaattatattcttaatatagtcaactgttttcatttttttacttcatggtttaggtttttttgttagaaatttttctgtattccagggtcataaaaatattctcctatattttctcttaaaggcattatggttttgctttcttgtagttgtcttcaatctgtctggaaatgactttggtacataggaggaagaagtttaattatatgtttttctttgtatacaaataattttttctattgagtagtcaattgttactcttctgatttgccacacctctttcatatattaggttttccatatgtgtttgggtctgtttctgggcatttatccatctcttcatcaagtctacattttcttaattacaataattttataataaatcattatatcccataggacctacttcctgacctcctacttcttcaagctcttcttggctactctatacaaattttagtatcagtctgtcaacatccttgaaaaaccagactgggacttctttttcatattgaacatattgactaatttggcataactgacatcttcgtaaaactgagtcttctcatttaaggagataatttatctttctgtctatgtagatctttttatgtttttaaataaggtgttataattagctttgtcttatgttaaattgttgcttaggtatcccatagctatttttgctactgtaaatgaaaactttatttgcaaaggcattttcaatttatctgctggtattaataaagcaatagatttttgtatgttgatcttatatccaacaaaagttgctcagttcttattaatatgtcttttgagtctcttagatttttctttatgtagatgatccactcatgataaataataacaacttcatttctttccatcctaatccttatgtttcttctccttatgtccttatgtcctactttatgggcagggacttccaatacacactttgatgaatagagtcactgtccacgggtatccttgtgttaatcctgcttttcaaaagtatgtttccaaggatttacaattacatatgtatctgtttctataggttttggtatttatgtttttttcagtttaagtaagttcctgtctgctttctagtttgattattttgagtgctgaattttatcaaacattcttctcatctattgatatgatgattcttctcctttaaactgttaatgtaataagttaacagctattctaacatttaatcaatcttgcagtcttggaataaactcaacttgcttatgatatatttttatgcacattgctgtgcataatgtgtatttttatgcatattgctgtgtttggctaatactttatttagagctgttgcatcaacattcttaatgagagagattgcagttttcctttcttgtattgtccttttctctttttggtatcatacttagtagacatgtaaaatgaatttagcacattcctgaacactctattctcagaagcagtttgtacaaaacggggattatgtgttccttgaatgtttggtagaacttgtccatcaaaccatctgggcagtactctatatacttcattatatcaagctttaagttatgtagtttaagtttctgtatcctttggcaggcttttttttcgcatttgaatgatcagttatgatatatgtgaacttatcagctttgttaaaatctccctccatgattatggatttgcccatttctccttataattctgtcaacctttggtttatattttttgaaactatattactagataattcagagatatcttcctgttaaagtatttctttgtatcataatttaactatcctcttttgcctaagtctattttttactgatattactactgctatgctagcttttttgaataatacttgcttggtgtgttctcttcctcccctccaatttaaagcttttaacttttaacatttctactttatgttttatgcatagcttttgtaagtgatgtatagctggatttttaaaatatttcttctctctctctctccttttctttttttcagggtctctttctgtcgcccaggctggaacgcagtggtgtgatcacagctcactgcagcctccacttcccaggctcaagtgatcctcctgcctcagcctcctgagtagctgagactacaggtgcatatcaccacaccagattaatttttaaattttttgtgcagatgagggtcttgctatgttgatcaggctggtctcaaactcctggcttcaagtgatcctcctactttggcctcccaaagtactgggattctgaacgtgagccccgactaaaatatttctatatgacaaatagaaatatttgtctcttaactggaaaatgtgtttcattaatatttatggtaattattggtatattttgatttaattttagcaaataatattgtacttttaacttatccttctctgtgcttttctttcctccttcattaatttttttttcatagatcaagtctttctttaaaaattccccctgcaccttctattcggatgcctatgtccatttggtagttgtccttaaacttataacaaatatttttgagcaaagcaaaattaattaatttctttttcgtcctcctgaacaatgaaatgattttagaatcctattactgaacataaaagcagcacattttagattatttccttatatctgtcttccagttcattaatattcttttcagctttgcctaatttgccacttaatccatgccttgagcttttaaaattttcaattaacttttttttttaattctagaagttttatttggttctttaaaaaaaatcacctagcctttttctttttgacaatgtcttattcttttctcatatttccaattccttcttttagagcttcagtagttttaaacatatttattttctagttttttggctgatatttcaactaaatgcagttcttggggagaggtgtctaatcctttttggtttctgctgattctcatttatagtggtttgcttcctcatatgttcaaatatcattgtgaattcttttttgttttcacagtggcagatagtatatatttgaattctaaacatatctgagggcaggcccaatttcacaaactcaaagggaccttgtagagttcaaagagagacatgattgcttcctacctctttgtgctagggcagagtgggattgtacctactgaaatacagtaggtaaccctgtgagggtcctggctttcatgaggatctcccttctaactctccacctttggcctaagctttgcttccacatggtcatcaacatttggtggttatagaactaataacccctatctcacttcactcctatgccagaggggccctagcatcagctcatgggattgttgtttttgctttcctctctatctttggctccgggattttccccttactttaatgggagctcatctgtaccttttaagtttttattaatatcatgtgaacacagacctgtatatattgttagaagcagaaatctctaagtttacttttaaaacatgatccttgcctcgaaaccttgtagaataatataatgtccacataataccaagttatgaaaagaaacatacctaaataactaaataagtatattccttttttcccccagctttttttccccattctaggtttacccagttgtactgtgttgtttgtcataggccgggtgaggtggctcacgtctgtaatcctagcaatttgggaggcgaaggcgggtggatcgcctgaggtcaggagttcgagaccagcctggctaacatggtgaaaccctgtctctactaaaaatacaaaaattaactgggtgtggtggcgggtgcctgtaattccagctacttgggaagctgaggtaggagaatcgcttgaacccaggatgcggaggttgcagtgagccgagatcacaccattgcactccagcctgggcaacaagagcgaaattcagtctcaaaaaaaaaaattatctataaaagtataggtgcaactcctcaagtattaaagacaagatagctcggattggacttgactttcagagccataactattcttaatatgttggtttatcttggaatcagaccattttcagtttcaacctgtaaaacagtgtacaaaggaaacatggaaagttttctatatataaagggttgtgaaataataacagctcacagaaaatgctgaaatgatgatttgcttcagtaccctctgaaatttctcccctaccacccctccttcatccccattgctatcaattcaaattacaacagctaattctcaggagaacagtagaagcccagtttctctcctctttcccctctgaccctcctccaattaatctgactgcagcgtaaacctttgcggtttaatattgtgcaacttccacatttccctcgctctcccacccagccccctcccccaccaaattcaggggaactcccgttaccgcagtgccaccagcattactcattcatccccattcaggctttcctcagcatttattaaggactctctgctccagcctctcactctcactctcctccgctcaaactcagctcacttgagagtctcctcccgccagctgtggaaagaactttgcgtctctccagcaatgcatctccttgcgattctgttttgtgctctctggtctgcagtgttggccgagaactcggatgattatgatctcatgtatgtgaatttggacaacgaaatagacaatggactccatcccactgaggaccgtaagttcactttaactgtttctctgctaaccctgactacatatccacctcttggtctaaataacacacatatactttgtggccagtgagacaagttaaaaatttatagcttgttatgcaaaagtgagaagcacttgaagaaagatggaggtttcaaagttatttctgtaacgtacataatgggttgaatcatatcaaatcgtcaatatttgactgttttgagctacataaccggcgatttcatagggtacaacttaatctatacctgaatgaatgatttctgtcgtttctgagacatttacatgctgtttttcggaggtgtccttaaagggaaggggaatgccaggaacgggctgcaacttggcaccaccgagggaggtcagcttttacaaagcacatccaaggcaggcctgggcgggctgctaacgtgtgtgtatcccgtactctagccacgccgtgcgcctgcggtcaggagcactcggaatgggacaagctcttcatcatgctggagaactcgcagatgagagagcgcatgctgctgcaagccacggacgacgtcctgcggggcgagctgcagaggctgcgggaggagctgggccggctcgcggaaagcctggcgaggccgtgcgcgccgggggctcccgcagaggccaggctgaccagtgctctggacgagctgctgcaggcgacccgcgacgcgggccgcaggctggcgcgtatggagggcgcggaggcgcagcgcccagaggaggcggggcgcgccctggccgcggtgctagaggagctgcggcagacgcgagccgacctgcacgcggtgcagggctgggctgcccggagctggctgccggcaggtaaggaggcaagcggggccgggacctcccactgcggctttgttccgggagcgcgcgtaacggcaagccaagccaggcaaccttctaggggaagctttcatgggaagcgcgcgcgcgcgcgcgcacacacacacacacacacacacacacacacacacccctatttctgcatgcgcggtcacagagctcaggcacaccatacaaggcgggaaaattggctttaaaaaagtattcctcagtcctaaggagccctaaagagagttgtggaggtaaccatcacagtcttgaaatagacgtctagggccccttacacccgatccgactaagcgctgcaggagtccactggcccgttataaccgtgatccctcttgccgcccagcttccctccgttagggatttccacgtcttctaattttatcctgcctctgtctttagaggagctctggtttcccgcactatttcagggcccaggctaacgtttagggatgttttccagcccctcagccggcccctcctctccgcccacccattctcagcaagaaacttgaggctaaagctaatctcccgaagggtcagcggaattcttcaggggtcccccagcccccggggtttgtggaattagcgcgacaggggaggtcggagggtgtgcggtttgggattcagcgtggaacagtcaggtgtaggagccaatccgtgtaggggatcccagctccaccccagggattcagagaattggggccaagcaggagagagactgttcaaaccacaggcaacttctcaaagtcccatgtgacactccatgaatctccaaacagacatgggttcccaaaataatacattctaaagatggttaaaagaaagaaatagaagatttggagccaatcaatactcctttgtatgccaaaacttctaagaaatggtggtgtgacaatcattttggattgtattagaaaatcagtgtcctaggtaagaaaatataacttgcacttttcctgagaatccttccctgtatttccaagaaaacaacttttgctggatggggagggggaagaagcatgtttcatttaaagttaaagaattttatgtaatgagagcatgtttcatttaaagttacagaaaccatatcatatttcctaaatatttgaggggtgcttgtcagtaaatactaaatagggcttcagaggagaaaaagcataaaatcaaatgtacactagattctcaatgtgacaggagagaaattagaattctgcagccattttaatggatgaaatgtcttgtgtttcgcaaaccacgtaaagtcattgtacatataatgcacctgaaaaaccgaagaattactctattttttatcttcatctttgcatattagttagagcagaagagggatgcatttctgaattctaagatgttaatccttattacatccaataatacttttacccatatgctttgatttatcttctcttggtctccagccagcttggctcctaaccattctgttgttagcctcctaagaacctggttttaattttgtttggtctttgataatcagaaaaacctattagttaaaagccatttcataagagagtttctgacattttaaagaggtattaagagcctcgtttttgggtatccctggtccccaaaagaggatcaccaaaaatagccaacatgcggttccagtccatgaacttatatagccagcgtagcctagagggaagctgagtctctgagatgcaatccaggagtgctttggaatgcaatcctgactgcctgggcttatttaaagaggaaatcacttaattcgattgcagtaggcaccctcttgaacactacttttttgtttttttctttgagacggaatctcgctctgtcgcccaggctggagtgcagtggcgcgatctcggctcactgcaagctccgcctcccgggttcactccattctcctgcctcagcctcctgagtagctgggactacaggtgctcgccaccttacccagctaattttttgcatttttagtagagacggggtttcaccgtgttagccaggatggtctcgatctcctgaccttgtgatccacccgcctcagcctcccaaagtgctgggattacaggtgtgattgaacactactttattgaaactttatagagactatatcaaatgcccatggatatggtgatttttttcagtgatttttatttgattttaattaacacagctggaagaaaagatgtacctagcaatttcatttgaaaatagaatcactgcctcattaaaaattaattttaaaaaatcttcaaaagttcaaattatttagtgaaaaagtatcaaagcatgacagagccagttttgtgttttagtattgtagttacttttatatgattatctgaatgccaatattttatttgactatccctaacactaaaggataaggttcatatttgtttaatgttttcaggatagagcctacccctgagccacttgtaggaatctgacatagtttaccacacttttacatggatgtttggtttctgcaagttctttctctttaccagttattctggaaccattctgggagtttgcttttcaaagctgtcttatggcatatcttctttaggttgttatacctgccctaatttaggtgtttttaaaaaaatacctacatacacatacacacatatatatacacacacatttatatacatatatgtatgtatacatacatacatatccatatgtatatatgtgtgtatatatacgtatacatacatatatatatatttatgtatatagatgcagagctcacctgttctttcccagggacacgtaaaaggttttcgtttcagcatctccagcttcccaaatggctaagtcgccttgagatggacaatggtggaaacttactgagctttccacctcaaatttgaaagtccccctcccaagtgctctttagcagaaacatgttctccaaccaggccccttgaaagaatgtacttctcttaaagattttcaattactgcttaaatagtaattataagcatgtggacaaggtagaatttttaaacacatttttggtctattcagctcttaagtgctacatacttgctgcttacagacttgcagaatattaggagcagaatggaagggccttttttagataacgctaaagcctagaggaaattatggtgctcatccaaagttgcatggctcattagtagtaacaccatctggattctagccctcctagagaaatctaggggttctattaataagaggcactgtagtgtgctgattaagggcgtggcctctgtgaccagactgcaaaaattcaaactctagttttactgcttatcagctatgtaaacatagataagttacttttacctaagttttctcatctgtaaaataggaatgtaaaagactatctcttatggttggcataaggattaaaatgacaaacaaaatgattagaacagtatctgatacatagtgaatgcccaataagcttagtcatcattattatacattgttgcctttcaaaggtagttttctaaaaactctgcaaagtttacaaatatctgagaacatttggtgtattaaaatgtattctgcaggccaggtgtggtggctcatgcctgtaatcccagcattttgggaggctgaggcaggcggatcttgaggtcaggagttcaagaccaacctggccaacatggtgaaaccccgtgtctaaaaaaaaaatacaatagttagctgggcgcagtggtgtgcacctgtagtcccagctactccggaagctgaggcaggagaatcgcttgaacctgggaagcgaaggttgccgtgagtcgagatcgcactactgcaatccagcctgggtgacagagtgagactctgtctcaaaaaaaaaaaaaaatgtattctgcaataacatcactatcctagaattttgctgaaaaatgcatgttggtaaaggctaaatggagcgaactaggtctactgaatttcacaggtttattattttaggaacttggtggtggcaaaaagagagaaccaggttgggttctgaattcttggaaattatagaattattgtctgaagttaactgatagtgattcaacttttttaaaaaaaagcagtaacaaagaaaatatgcaaattggaaggggaggtagttatggcttttattattttgtgggtttggactagttggctcttctatttgcgtgctttctcttcatttagatgcttcattggataagacaattggctttcctttttctcattttctttgctctgcagagattacagtggaagcttcttaagtcgtaatgtagggtttcacatagctttcaattgtaataattaaaattcttatgttaaataactaatgccagaataattctgaattaatttatattttctttaatattcttcttattttcttgctactctaggttgtgaaacagctattttattcccaatgcgttccaagaagatttttggaagcgtgcatccagtgagaccaatgaggcttgagtcttttagtgcctgcatttgggtcaaagccacagatgtattaaacaaaaccatcctgttttcctatggcacaaagaggaatccatatgaaatccagctgtatctcagctaccaatccatagtgtttgtggtgggtggagaggagaacaaactggttgctgaagccatggtttccctgggaaggtggacccacctgtgcggcacctggaattcagaggaagggctcacatccttgtgggtaaatggtgaactggcggctaccactgttgagatggccacaggtcacattgttcctgagggaggaatcctgcagattggccaagaaaagaatggctgctgtgtgggtggtggctttgatgaaacattagccttctctgggagactcacaggcttcaatatctgggatagtgttcttagcaatgaagagataagagagaccggaggagcagagtcttgtcacatccgggggaatattgttgggtggggagtcacagagatccagccacatggaggagctcagtatgtttcataaatgttgtgaaactccacttgaagccaaagaaagaaactcacacttaaaacacatgccagttgggaaggtctgaaaactcagtgcataataggaacacttgagactaatgaaagagagagttgagaccaatctttatttgtactggccaaatactgaataaacagttgaaggaaagacattggaaaaagcttttgaggataatgttactagactttatgccatggtgctttcagtttaatgctgtgtctctgtcagataaactctcaaataattaaaaaggactgtattgttgaacagagggacaattgttttacttttctttggttaattttgttttggccagagatgaattttacattggaagaataacaaaataagatttgttgtccattgttcattgttattggtatgtaccttattacaaaaaaaagatgaaaacatatttatactacaaggtgacttaacaactataaatgtagtttatgtgttataatcgaatgtcacgtttttgagaagatagtcatataagttatattgcaaaagggatttgtattaatttaagactatttttgtaaagctctactgtaaataaaatattttataaaactagctcacgtcatttaattataaatttaagagatgttttggagcaaactcgtacttttctcttttcatttaaagtaggcaattagttttcagatactattatgtaaacagcatggttaatattgttaggaatgagcaactatagacttgttttaagtttggcttcctataaatcataagcaagaaatattatctctgccaagtcaattcatctctgtgggttttagttttctcagctgagaaatcaaggaattgatgaaataagaatctctaggactcttcccatttgacaattctaggagcttatacaactttctgtactgtgtaacataaaaacaaacaccaaacatgaattatcacagttcctcagatacacatgatgctgcaagacatggcttaggaatgttatttgggagacctaagaatctggaaaagaactcctgccctgaaagcacaccccattctcttccttactcagaagggagaggtcaagccccttcacactgtggatggggaggtaacttttccccaccacactagtattctcctgtagattctatgtgagggctgatagaagggcctcacaaagctgattctgaaatgttgtgggcccacagtgatgatatgtcctctgaaagatagggcatggacaaccacaggacatttcctcttcatgaggtttggagaataggaccaggagtaattttgtaactaactagctaggtgtcagacaagttacataactcctctgcttcttctcagtaaaaggaggtgattggactcagtgcctttcagcaataaaattccatgaatctaataatttttgagtatgttcatcatataagtatagcttcattccacttgtgaaacccacaaacgaggctaagcctctaagaaaatcacttgtagttaggggctgataggccagtctcagactcttggagatcacataattcaaggctctaggcacactgggcacatgcaaagtccctgtctagccattgtctatatgacttgaactcccagctggaagaaggaaaactagacccaaaacttaagcagaaaattaggcatgatttaaattcctttacatgctgcaacacgaattatacatgtttaagtgatgccagatgttgcaggccgagataaatgcaaactcatatgctgacagaatttaatataagaaaacttttaatttttttaagtaattacatgtttagggtgaagaacaaacaaatagaagaaaataaaataatacttgggttaaaaaagtagaaatttcatctgttagagcagtaagtctagctaggagttctagggacttctaattgttcccagatattcattttctctctttctctaaatgacagaatcctagctttagtggaacatgtgaccactcagagtaaattctatatttttcaacattacttgcagcttgatgcagccatataactatgttctgaccaacgctgaaatattatatgtgattcttttcctccttctgtctgattggaatatggtaatgggctggaatttcagcaaccatcttagaccaggagaccccatgcaacaatacagaagaagcatgggttcctggtcattgtgaagccatctagccagccctgagctgcctgcccacggacttcttttacgtgagagaaaaatatacttttgtcgtgtttaatcttttagttggttgatcactcaatctaattttgatccagtaatttttattttaatttaaaaaactacagccaggcggggtggctcaagcctgtaatcccagcactttgggagtctgagccaggcagatcagaagctcaggagatcgagaccatcctggccaacatggtgaaacccgtttctactaaaaatacaaaaaatgagccaggcatggtggtacgcacctgcagtcccagctactcgggaggctgaggcaggagaatctctcgaacctgggagatggaggttgcagtgagcccagatcatggcactgcactccagcctggcaacagagtgagactctgtctcaaaataagtaaatacataaattagctgggtgtagtggcgtgcgcctgtaatcccagctactcaggagggtgaggcaggagaatctcttgaacccgggaggcggagattgcagtgagccaagatcgcaccactgcactgcagcctggcaacagagcgagacttcatctcaaaaaagcaaaacaaaacaacaacaacagcaacaaaaacaactacgcactttattctccctaaaacacccataacctaaacttggaaaatgcattttacaaattctcaggaagttggatatctgacttaaaaaaacaacaacaactaagcaataacatttaatgactttgagaatatataggtgttagcaaaaggaggaaataagaaatgtgcaaaactgagataaaatatctaaagagaagtatcagcatgctggcttatgttagcacattgtcacacattttcatttaccaaatacttattgcgacatcaccatattacagcatagtaaagtaattgtgcaagatgactcaagctattaggaggaaagatgtatgtgtaataaatatgtaatatatatatatacatataaataatattatttgtgtgtgtagagtgaacaactgtcctggtttgcctaagactgtcccatctttagcactgaaagttccatgtcctgggaagccctcagtcccacgcaaactggaacagtttttcactctagtatgtatgtatatatctccagcagagctaattttttggcagagataatatatgaactaaacacagttgatattattttccttgtctattacaatataaattggcttataagtattaacacctttaaaatatattcagaacattctactaccaagcatatagtgtagaattgtagagctttctatttacaattacttgattgacttcactttaacaaagaattagatttgcaaacaaacaagaaattataattgatttttatttcatttcctgtcaaatcttagattagaaatctcttccctgagttttactaaggccaaatgtttccagcattgtctttcagccacttaagaaatgcactcctaaggttaaagtcttggttaaggtaattgtatatgttcattgatgtattcttggattcagtgaacatgaacactcctatcgttgatccttgcatcaagttttataaatctggagtgtagcagaaaagtttgctgggtttggggtcagaaatccagtattcaaatcctggcaccatcacctactaacttaataactctaagaaatcaggcctgtcaagtaatctctatgagtctcaaattagtcaggaacttagggataacaagacttgcctaccttgttgaaagattagtaagcagataattttcaaaaaagtgttttataaaccatgaagttatattgaaaataagatagttatcttaaaaaatgtttttccaagttgttttcagtggattgaaactaaataagcaagcaaacaaaaatacgaacaaataaatgaatgtaaggattcttttccattgtgggtaagtcattttcagagttcagcacacaaatgtccaaatctatgcaggccttgttctacttcacagcagcatctactggtgaagtcaagaaggtgcaaactctgagttagatcagatccaagatttggttaacaatttagaagtcttttcctgttttaagacgtctctattccttgatccatatgtgcattgtcttttcataactttacatttaatagttttctatgggtataaatattcaggttgaatattcttaataagattgcttagtagcttgtttcctagaatatttgattaataaattctttcccaacaacttgttttatggtgaacttaaaaaccacttcctttaagaataattgtatcatgaatttttaatggttaagcatttccctagagattatgaaactccatgagtggatatggttctgcttccaatcttttttttttttttttttgaaatggagtctcactctgtctcccaggctggagtggagtggcatgatctcggctcactgcaacctctgcctcccaggttcaagtgattcttctgcctcagcctcctgagtagctgggactacaggtgtgtgccaccacgcctggctaatttttgtatttttagtagagatggggttttaccatgttggccagcctggtcttgaactcctgacaacaagtgatctgcccatctcagcctcccaaagtgctggaattacaggcatgagccacagcgcctagcctgcctccagtcttttaatatggacctggtacacagcagatactcaattggtgatgacaaaaacaaccagaacgatgatgatgatgatgatgatgatgatagaaatcatggtaaccattgatgaactatgggcccagaattgtacaaaacatagatattttatctatttaagtctcatacatcctatatcacatatattataactgtcatattaaatgggggggggacaattttctatctccatttttctgagactgctcaccaagcaatggtttgaaatttgtctcacacagagaaaaaatgagctgaatttatcataattaactagacagtattttccaggtcattgccagcaagtaaaaaaggaatttggactcttgatgagatgttacattttcttcccaaagactttctacttaagtttccaatcatttgaagtcgttttgtgacttgtgccagaggagcatgtaaaaggcatattgatggtgaggcatatttctttattatgatcactgattcagaaatgcagaaaaagggacattactacttttagattaaatagcaatggtgttcattgcattatggagtttcacatcaaaattttaaaagggcttccctataaaccctcagataatccactgcagttgtagggtcttcaataatattttcagcttcttgagtgaaagatatgctaacttgtgctgcactaagcattggttgtgcttttatttatcagtactgaaaaggcattacagaccattttcatatggcaaagaacaagtttggagacttattcgggagcactggaaaacaactttcttttctaaaaaggttctgatgttacaaaacatcacattttacccctgatataatttaagcagaaaacaaattcattgcccaagtgatatggtttggctctgtgtccccacccaaatctcatcttgaattgtactcccataattcccacatgttgtgggagggacccagtgggagatacttgaatcatgagggtggtttcccccatactattctcatggtagtaaataagtctcatgagatgtgatggttttataaggggtttcagctttcactacctcctcatactctcttgccaccaccatgtaagaagtgcctttcaccttccaccatgattgtgaggcctccctagccacgtggaactgtgagtccaataaacatctttcttttggaaattgcccagtctcaggtacatctttatcagcagcatgaaaatggactaatacaccaagtgacatccttatcttattttttaattcaaggggaaacattaatatttccctaataagtataattttagtttagttgtttagtattaatagataccttttatcagaataaggatgttcccttttattgcttgtttgctgagagatttttaaaattttactaaagaagagacttagatttgttttatgtatttaggtcttattccatctgctattaatttatgcatgctgtgatgtggacaattgtctcaaaaccatttattgaatagtctgtccttctctattgtcaatattcccctagcatatacacagtttccatatatgcacagatttgtttcttgcttctctgttctattcatgggttatttacctatcttacactagtgctacactgtcttgattattatgattttataatatattgatatctggtacggaaattactgcctcttcctctcccccaacaactcccattttcttctccttctgtgaaactgtcttggctatctgtttcactttatcttgtaaatttaaaaatcagcttgtcatctttcatggaaacctctgttgctattttatcaaaatttcactaaatttattgaaaatttacatctttgccacatcaaactctcccatcagtgaacacggtgtatttctccattttcttatttaattgctttcaatacacttttataattttattctcaaaagctacatttcctgtgggtattgtatatttttctactttaaataatatttttaatattatattttcaatttattatgactagtatgtaagaaaaaaactagtttctctaaattgatctcacttccagcactttactgaaatttgtcttattttgtcttaaaattgactggagaatatttactttttttttttttttttttttttttgagacaggggcttgttctgtcacccatgctggagtgcagtggcacaattacagcttgctgcagcttcaacctcctgggctcaagctattttcccacttcagcctccagagtagctgagactacaggtgcacaccaccaagcccagataaattctttgatttttagtagggacgaggtcttgctatgttcccgaggctggtcttgaactcctgagctcaagcgatcctctcaccttggcctcccaaagttctgggattgcaggtgcaagccaccacacccagccagaatatttaaatgttctattgtagacaattatcacatttttctagagataatgattgttttgacccttcctttctgttataactttcatttatttttcttgtctaggctagggcttctgtgccacagtaaatagaagtagatatattggtatcctcatctcattcctgactttaaatgaatgcttctactgttccactatatgtatatagtgaaatatatatatatatttatatatatagtgctctatcattatctatctatatatctcctctaatcatgttaagaaatttgtccaaaattactagtttgaattttgttttcatgagcaaagaggtactgaattttatgagatactttttactaatcacatgatgtttttcctctttagtcttttgcagtgtggaattatatcgaatattaagccgtcctgcatttgtgggagaaactcaactaggtcattacgcatttataaagtgggcttaacattagtttttccctcataagatattgggagagaattacataggttaaaaggccagtacctggtatatagtaagcactcagcaaatgttaactattatttactttaagcactgctagagtcattttgctaaaatttttatttatgatttatgcatctatgttcataattaagatggacctgtatttttatttctcatactgtccttgtctggtattgatatcatggtattgatatcctggctatactagccctgtagaataaggtggagaatgtttttctgtttcagttatctgggaaagttttaaagagattgtaatgatctgttctttgtatatttgttataattttcctgtaaaactaaattggtatgttttttaatttttttgtgtgtgagttgattttaaaatactgacagaattgtcttatttggtatagagatattcaagttttctatccccttaacttttaagtatgaatcaagataacattccaattatacctttaatccttcctccaagaagtaagaagtaagaccttttacaattaccacttactgggagaattcagagaatacaaaacagacaaaataactctaaacaacttgaataaaataaatgtgtacttaaacttaatgtaaaactaaacattacttatatataaccattaataataagaggtagcaaaaattggcttagaactattgaaatatttgccttcagggataaatacatagcccttggacaaagtctctcatgattcactcataagcataaaagagcatttggtttgaaatcaggcacaggatgcaaatggatgcatataatacaattgttaaaaatatgatcaaggaaataatagcaaacaagtctaagaggcaaacacccctgccacagcacaagagtctcctggccctatctcatcaactttttaatcagtgttttaaaatgaagaccagagtggctctgctcataaaatttatgggtgacaagaaccttggaagagctgcagatacactgagataaaaaaacatctaacaagatctttgcatgccaaagcaatgggtgaatctcatgaaagaaaagtgtaaagaattaaaagtaagtacttgcataagacaaaaagcctgctaaacacagagtatggcagaaattgctgaatatactaagacaatttatatttaaaaatttggagatttcaaatataagtcaagagaaatcaaagatgtgattgtgtgattgacaaaaaactgaatttgattttaggttacattaaggaaaatacagtattaatagggaggataaatccattttagtcctcataagcaagcaaatcagagcacatgcaggggagggcagccaagcagagcgggggtctgggtacatcttgcaaatggatgcagaaacaagtcatcatctgctgagtgagcaagctgagagggaaactatgaatgttatgcctgaggaggaaaagagggaagtgcaaagggaaggagtggtgagatatgaaagtcggagctagtttttgaaagtttgtcatgtgaaagaggaacgagggtttattaggcccaagaaaagggccttagtcaaaagtgggaggccacaaggggagaacctctaattcaacaaaaggaagaaatgtctagtactcaattttgtccagagataaagtgggttgtcacaggaaacagtgagtgagttccctggcaataaagggattcaaatataggaaggcaagtatgattatcctcatcaccaccttagctgatatttattgaaagctgactatgttttggcattatctcatgtcattgtctaaacatctatatgtacatatgaggaaacaggctgggaaaataaaaatacaatagtgtatttggcggtgctaagattacactgtgaaagtagactttacagtgaaatggtcagggtttgaatcttgcttttaactcctctaagcttcagcttgctcacttacaaaatgatatagtggacatttgtgttctttcatttcccactattcattcacctattgttggcaacagtcctgggtttcttttggggatctactcctcctctactcccaatctatgtggctttgctgcagccgactcccattccctgctttgagggtggctcatgacctaagcctgaccaactgaagtacagtatcccctggaaataatgatggattggttcagaaatgttcatgtggcctgtgtcagatcaaagagaaaaaaagaggctggatgtgaactttctttttcttaattggtattcatgatgatgtgagctggaagctgtagaggcctacaccaatcgcaaaagtaaaacccatcctgaggaagcagagctgagaattgacttttgggacaccattgagccctgaatcaaccatctgggaagtctggtatgctcatggactttgcaggcatgtgtgccaaggaggagttgttgttgctcctctttctccttctcttcttcctcatcatcaagtcgtttacatctgtaggtttctgttacctaaaatactactaactggtaaaatgggataataataggacttcttttatgaggttctcgtgggcattgaatgatataatcggtataaatggcttaatacagtacctggcatcagaaatgcatgcagtaaattttagccattgtagctattattaatgttattgtaattatcatcatcatcattgcatggatgaccattcaatgtattttatagaagtagaaacatgggaaaataaggattagtgtactgcaaggcaatgaagatctaaagaggagaaaaactataagtaatgaaaaaagaaaccccatgatgactcctcaggctgtctggtaggggatgtaagacaaagaattgcagagcagaaaacttactaatcagagagagcaagatcccttctgctttgcaacttaaagtttgatgggctcatgtgagtgataatggagttttacagtcacatcagtcttaaaactccaaaccctgagatatgtagccccaaccttttacaggtcaaattaccattcattttatgataattttcatagtgccagatcaaataaaccaaattatttgtttatttcaaatgcttgcagtgaatttagaaagtgtactttgtgtttcaaagatttcattgtcatcgaaaaagcattttttaaaaacccaaagagatgagctaagttcttggcagcaataaaggggtaattcatttttttttcataaatctgttatttgcaagtctgactatcatggttttaaaatgtgtggtgtgtataagtgttttaaattcctataaaatttgtttcaaaaatgtagccaaggtgttgaaaaaaacataattgcttttatgggctttaagcaaatttaatattacatataaagtgaaattggtgatttaatcccgtggccaaaggaaattggaaatgaaaatactgactagtattattaatgacaaatctttagagggaagcacaggttgagtgataaatttccactctcagctggagttcagacatacctggcagaccactggggtggctggtcagcagtcttgcaatggtactaagaacccaccttaggaatgtctggtacaatgagcttaagttaggaacaaaactttagttcttggaaggcaataggcattttgagaattaaagtattaatttgttggtaaccccaactcctgggtgaatagttgagcccaggggaaggaaagacagctttagataaaacaataatctattttattttagtttttcaacttttagagtcaagggtacatgtgcaggtttcttacaaggctatattgcatgatgctgaggtttggggtacaattgaacccatcacagaggcagtgagcacagtacccaataagtagtttttctatccttgtccctctcttcctacccctctttcagtcccccagtgtctatcattcccatctttatgtccacatgtacccaatgattagttcccacttataagtgaaaacatgtggtatctgcattaattcgcttaggataatggcctctagctgcatccacgttgctgcaaaggacatgattttgttcttatttatggtagcatagtattccttggtgtatatgtaccacattttcttcatccaatccactgttgatgggcacctaggttaattccatgtctttgctattgtaaatagtgttgcaatgaagatatgagtacatgtgtctttttggtagaaggatttattttcctttgggtatatatacccagcagtagaattgctgggtcaaataatagttctattttaacttctttgagaaatcaccaaactgctttccacagtggctgaactgatgggcattcccacaaatagtgtataagcgttctcttttctctgcagccttgccaacatctattgttttctgaatttttaataacagacattttgactggtatgagatggtacctcattgtgattttgatttgcatttctctgaggattagtgatgtggagcatgttttcatatacttgttgactgctttcatgtcttcttttgagaagtgtctgttcatgtcctttgccgcctttttttttctttaagttcaggggtacataggcagtttttttatataggtaaacttgtgtcatgggggtttgttgaacagattattttattacccaggtattaagcccagtacctgttagttatttttcttgatcctctcccttttcccacccttcaccctccaataggccccagtatcttttgttcctctctatgtgtccaggtattgtcataatttagctcccacttataagtgacaacatgcggtatttggtttcctgttcctgtgttagcttgctaaggataatagcctctggctccatccaagttcctgcaaaggacatgatcttgctcttttttacggctgcatagttttccatggtgtataggtatcacattttctttagccagtctatgattgatgggcgtttaggttgattccaatgtctttgctaacgtgaatagtgctgcaatgaacatatgtgtgcatgtgtctttatgatggaacaatttatatttctttgggtatatacccagtaatgggattgctgagttgattgtagttctgtttttaggtttttgaggaccaatcaccactaacagtgtataagcattcctttttctccacaaccttgccaatagctgttattttttaataatacactgttgtgagatggtatctcattgtggttttgatttgcatttctctaatgatcagtaatgttgagtttttttcatgattgttggctgcatgtatgtcttcttttgaaaagtgtcttttcatgtcctttgcccactttgtaatttttttcttgtaaatttctttaagtttcttatagatgttggatattagacctttgtcagatgcatactttgcaaatatttcctttcatcctctagattgttcactctgttgatagtttcttttgctgtgcagaagctctttagtttaattagatcatatttgtcaatttttgctcttgttgcagttgcctttgttgcaattgcttttggtatcttcttcatgaaatttttgcacattcctatgtccagaatggtgttgcctaggttatcttccagcgtttttatagttttgggttttacatttaagtatttaatccatcttgagttaatttttgtatgtggtataaagaaggggtccagttttaatcttctgcatatgactaggcagttattccagcaccttttattgaataggtagtcttttgcccattgcttgtttttgtcagctttttcagagattagatagttgtaggtgtgtagccttatttctggttctctattctgttctattggtctatgcgtgtgtttttgtacccgtaccatgctgttttgcttactatatccctatttgaagtcagtttgaagtaatacagtgtgatgcctccaggtttgttctttttgcttaggattgccttggctattcaggctcttttttggttccatatgaattttaaaatattttttctagttctgtgatgaatgtcattagtaatttaataggaataatattgaatctataaattactttgggcagcatggccattttaatgatattgtttcctcctatccatgagtatagaatatttttccatttgtttgtgtcatctctgacttctttgaggagtgttttgtagttctccttatagagatctttcaactccctggttagctggattcctaggtattttatttgtatgtgtgtgtggcacttgtaaatgggattgcatttctgatttggctctcagcttggctactggtggtgtgtgggagtgctagtgacttttgtacattgatttttgtatcctgagactttgctgaagttgtttatcagcttaaggagctttttgggttgagactatggcattttctagatataggatcatgtcatctacaaatagggatagtttgacttcctctcttcctatttggatgtgctatatttctttctctttcatgattgctctggccaggatttccaacactatgttgaataggagtggtgagagagggcgtccttgtcttgtgccagttttcagtggtaatgtttccagcttttgcccattcagtatgatgttggctgtgggtttgccattgatggctcttactattttgaggtatccttcttcaatacctagattattgggaatttttaacatgaagcggtgttgaattttatcaaaagccttatctgcatctattggatttgtctttagttgtgtttatgtgatgaatcacatttattgatttgcatatgttcaaccaaccttgcatcccagggataaagcctacttgatcatgatcgataagctttttgatgtgctgctggatttgttttgccagtattttgttgagagtttttgcatcagtgttcaaggatattgccttgaagttttctttttatgttgtgtctctgccagattttggtatcaggatgatggtggccttatagaatgagttagggaggagtctctcctcctcaattttttggaatagcttcagcaggaatggtaccagctcttctttgtatatctggtagaattcagctgtgaatctgtctggtcccaagcttattgtgattggtagactatttattactgattcaatttcagagctcattattggtctgttcagggattcaatttcttactggttaggtcttaagggtgtatgtgcccaggaatttattagtttcctctagattttctagttaatgtgtatagaggtgttcataatatcttctgatggttgtttgtatttctgtggggtcaatagtaatatcaccttgttgtttctggttgtgtttatttggagcttctctattaccttctttattagtctagctagctcctggatttgttgatcttttaaatttatttgtgtcttaatcgccttcagctcagctctgattttggttatttcttgccttctgctagctttggacttggtttcctcttggttctctagttcttttagttatgctgttaggttgttaaattgagatctttctaactttttgatttgcactttttaatggggctatttgtttcttgcttgttgaattgcttaagttccttatagattctggatattagacctttttcagatgcatagtttgcaaaaattttctcccattctgtaggttgtctgttgactctgttgataatttcttctgctgtctagaagctctctaattcaattaggtcccacttgtcagtttttgtttttgtcataattggttttaaggacttagccataaatttattgccaaggctattgtcaagaagggtatttcctagattttccttgaggacttttatagtttgaggtcttgcatttaggtctttaatccattttgagttaatttttgtatatggtgatagttgtccagttttattcctctgcatatagatacccagttatcctagcaccatttgttgaatagggagtccttcccccactgattatttttgttgaatttgtcaaagatcagatggtggctctaggtgtgcagctttatttctgggttctctattctgttctactgaaaaaccatctatgttactgcaaacatggcaactcagtttggcactgctctggggcctctctaccaaggtataacactgaggagaaaggctagtgttctttcccatcctgccacaggctgccacactgaattactgggctaaggacttggttgttcctaaagcttccagtggttcagcacaaagactgccatcactggcagggcagcacggagttcccaggagtggagtccattcctgggacctgcatggcagtggccttagggtctgctgggctcgcatggtggaagaggacagcaccccaccatgctatgccaggaagcatggacaaaatagcagtatgggcttggggattggtctggataccttgggaagagagcacacataggacacccttggggaccctaagaattaattggactgtgagcactttacagagggttgacgatcaaccttatcatgtggtgggttatggcagtaaactgtgggctgagatactcatgggcctcatgcatctttattaatgagaaatggggacatttggatgcacatcaattaatatcatgtattgttctctgacttcaagttcaaaaacatgttttttgattgatctgaaaccaaagaaaataaaagaagacaaggagaatattttgcatgaactaatttgagcttcttattcattcaaatgttgtaacaattaacagaggtgtactatttggctttttatgctagtatttatgcttgttatccaaatcatgttcacatttaagaagtcattacacattttctgatgtattttatctaacaaaagacatttcttgcttttggaagcaaatgaagacaggtttttcataccccactgagtgacgtgttccactcagtacacagagataagatctccacagttggtagttgaacaggtgaccagaagcacggaaatgcagttcttcaaactgagaaacacagatttggaagaatgcttacaattcttttaatgagtctaagtaattcatctgccttgggaagggacacagacagccagattaagtaaccttttgcatgttcacaggtcaactggcagcaaaacagagaaattaatttgcttctaatactctaggtcttgcttcccacaaaccataaatgcttgatgaaaatacttttaaatatctcccaaaacatgtccccaagctcaactttcgcaccataccttggagtatgctctttactataacttccgtgtgatcagccaggagatctgccttggtaattgcagccagagacaggtagttagacatattcctgcacagttccttgttgcctctgtggaggaatttcactgcaatggggatggctaatgccatcactgggggtcggttgtaattctgaggaaatataagaaagccacaaataataagtgactcattattcatttattcattcattcactcattcaaaaaatatttattggattaagctaccagagtacagctgtgaaaacacaggccttgccctgtttatattgtatttgggaattctgggaactcttggttttgtttaagagacctaaagacaaacaggcagttaacagcataaactgatgacagccgagatgggcaaaaggcagggtgctaacagagcagagaaggagcactcaatccagtcttggggaatgtcaagaaagacttcctggagggggtaatgtcttagttgggacctcatggatgaataagagatggctgggtgctggcaaggcagggagtagacagaaagaaggaagagtaggtatgcagagactgaggtgagggagtacctgatggcactggagagttgtaaatagctcaggatggctgaagtgtggtatgtgtgagaaaactggagtgggaggtgaggggagagacggggcaggtaaacaggggcatgattatgaaaggtccggcatacaaggctaagaagtttggcattgatctttagggtaatcgggggccactgataacaggaatcacttgtcagatttacacttgagaaaaaaacctaaggaatgttgaacaagtcgctttttgcctatatctatcttaaaaattaaagtttcagctaattagattcagaggaaaaaaaataaatgaatgtaagattaaaacctaaaggtattctggatcctaaaataattctcttcttgatttactttgtgactgaatataaatatccttacatataaagtagtcctattagcatttagttaccaaattagggaataatatttagaaaatacaaattgctttctttttttttctaccacataatgttttggtcaacaaattgttttcttaaaaatgaatggtacatattcactacacctggccatcaaccccacctctcagactaactgtagaaaaaaaaactgtgcagtgcacagcgtgtttgggagaaatagccctggactcctactcttgcattatttgatgacagacaaagttctgtgttgcttgtcccactgttatattcagatctttgttttgtagctgagcttgtaccctgattaatacaatgcaaagccaggaccacttacattctttaactttccctgtggcttaaagagaaaactatattcttagaatgaaatgtagaactccacctttatacatcaaatcttacaataaggacaaaagaaaagacatgagataaaaattgtcattgatacatacaattcctgagcaatagaaatggggcaattgggtcaattagatatttacatggggaaaaaacatatccccacccctatatctgccataactaaaatcaatttcagatagattgcagatctaaaggtgaaaaataaaacaagacagagaagacaacccaggagaacatctcgatggcctcagagtaggcaaggacttccttaaacctaactcaaaaataattaacaataaaaaagtcataaagtggataaaatcaagaacttctagtcatcaagagatatcatttaaaaagtgaaaagataatccaaagagtgaaagaagatatctataatatgttctgggtactggtaaacctttggataaatgtattttatatatataatatatattataaatataaaagtattatttatatatatataatatatatacacactcttccaatccataagaaaaagaagatgcaatcaaacagaaaagtagacagaggacttaaacagacacgttacaaaataaagctccaaaacatgaaaatatgctcaatttcattaatttttaattttgctctgggttctgattacagggttgtatttggagagaattcatcaagatatgatatgacctcttttctgaagaagaagcacagttatataattacagattttagctattcttttaaatagatgcaaaagttagtatgaatacagaattgcatattgtatgcatgcattttataaacaacctttgtcttagggttctacgaaggacaacgacacacagtggtggagtcaatgcagccaagaatataaaaacggtggtgacagtgtcaggaagatgacttgtctattcacactaagtatgggaatcaggtaaaataaatattatgggatatgtaaggcactcaaatgtatgttccttaaagagctaatgagttttgggagtgatagcattcatatcttgatatccagtccataaatctttcctgaagtcacagaaaataacattctatgatttttctctgatcttcatatcatcagccttttacactcctgcccaatatacatttatacttcttctggagactctaccctaattcctctgtggaactgtccaggtgcttctaatgaaggcatctctaccttttgtcttaaaggtgatcaagtgactcagacactgatcaatgagagaatcacatttccctggttcaaggaaggacacgttaccaaattataattaaggagccataaaatggctctgtgaaagagattctctctcctgctgtatttaaagtattgagaagggaggatcaaaagtagttgctgtcatcttgtgacctcagtaggagagaaactgtatgagactcaaggaaacatggttctatctgagagaccagatcctggtaatatcatttgagcccaatgccttaggctgtgcctgaggccagttatattcctaaagatttctaaatgagccaattaaatatcttgcacttaagcatccctgcctccccagtcactagaaacaaaaacagaactgataaatctttaatccattcctgcagttccatccattttccagactcaggggtcaatctgaccactgggcagagaaaataggtactccataacctaacctgatatcccactattaagtcagtcgtgttgaaagctctgatgctattctttggcgataaatcatgcgtctatatagcagttcctctcagtaggtctctggcctatccatcctagagttcttaacatcacggaagtatcagaaccatagcccatagccagtatcctctgacgacttccctgaatgcctttgtctagattgtctcccctcccagtgaatttaattgggcctgatctgactggatcattactgatacgatgagctttgagacctctctgagaggctggctgctcccttccccagaggttagtgctcagctttagaagtcagggcacgtgcttggttggaacacacaaaattgtttggacccactaaggctaactcacaccaaaggatttccaaaaggctggtacataaccaggcatgccagtgcactcaaccccagtgagaggctttcataggtcagacttagggtatccctttcacattttcaggatacctaggagacagattagaaactagagtgtccactcatgggcacaaaatcaggtcagagcagagagagatcctgagggatatttcaggtagaccacggtgaaacctgattaaaagaacactcctgccctataactgaatccctttctctgctcattggaagtttccattcatcagatccagtatttttcctagtggtgctggacaaacatgccaaaataatgacacaacattgagcatcctctttttgttaacatactgatcaaacatgtggtgtttagaaaagctaattgatttggtcatttttctcaattatgatcatatcctgtccctgctcccttgacttacattcaaaaaagttacttattagagcattgggtattccccaaacatctcagtctcacctatgcaatttcttgggttgcattttcttgggttcgagggtcccatggacctaacaggtaccaaacaacatccagtggctgagcttcactttcaagggcagcaaaaggagttggtaaaggaggagatctcaggcccatgaaactatttcatctctggaattatttgggtcacagaaatgctaatggcatgcatgcagagaaagccctatgattacagttctacaaacaaatgactttaacagcagctgataatgccagagcctatgaaagaccttgcttctcagtgcagatgtgagcatgttggatgaatatcatcttacagtttggtgctgagggaacaaattcagcgaagtgcagcatagaaatagactttctcgtggggacaatttagctgtagaggttaaacaagagagctttgttctacggatgccaagaattatatttctaaactagattagcaccaatttgaacttttggtggaaattgtgtttttgaaaatgcactttgggaatgttccccagtgttttaaaattgaaaagaatgaagctaagtaggaaagatatctatctgaggtaatagcaactaaaaagctctttggctcttaggccttgaattcaagtaagaaccataaaaaatgattaagctcaagaaatattaaacctcatttattaaaatagggttccttgattattcattcactattatcaatcaaagctaaaccaattttggatttacatataaaatggttcattcttcccagcatagctatatgtaaaatctaattggcacacaagctaagtttccccagtgaattttctgacaggtaatagggagcaggtctcaggaacctgggagtgtacatcccagtcccctcccatttcctgccactatatgagcattagatactgaagcctattctggagagaaatgtagctgctgtgaaagtcagagggcagccacgtctcctgagccccttcactcaaccattcaacaaatattatttgagcacctactatatgccaggcactattctacgtgctgggattacttcagtgaatagaagagcttataatttggggaaaggagagacaggatatttaaaaagtggctataacacataattaaatcaatagcttgttagaaagcatccagtgttattttagtctcctgcagataatgataatgatgatgataccaacttcctatgttctaaatattttgtctattaaagtctattaatttaattttcacagcaaactcatgaggcagctcctcttaatatctgcattttacatatgagacaattaaggcctggaaagattaattttcccaagaccacactacaggtacagagcagagctgggattgcctactgaataaactgctagattggcataaccagtcccatctctaagagttgtgaaggaaatgctctccactgtctgaggcacttcacatgcaacactagcaagggcagagtttaaaccttcatattacattgactggggaagaagaactgagaagactgtgcggcatcaaggagaaggaacagcaggtccttctataaagagggaaaagtagacactttctgattttccagcagcagatctggagattattctattacccctgttaccctgcaggcagcctgctttggttatttccctcttcatgcagtcatcaacagtggtagcagagattgggggaagatgaaatgtggagctgattaaatacatggcaatggctctgctaagtgatttggcttgggaagaggctgtgactgcagtagagtgaggataaagccaggcattggctgccaggcttcatgatggctgaactttcaattctctagaacttcattctagaacagcagctatgtcaataattataatgtccttgaggtacgttttaattttaatcaagtttgccaagtttgtttttatcctagaacgtaatacacattgtatgggtgtattcttttttaggatttttctaggagcaaaaaaaagtgggggggtggggatggccaactccatatagatatctggtcagagggttagaggaagctgttaactctaggtaagctgtactttgaattaggtacttccacatagtggctagagcacagatagagatcgcttttgtaataaaagatcctcttcatgtgcacctaccaccaccaattggaagtactaaactccagtagtttgatgtcttgaatggaaccagctggatgctcattttcgttgccctgcaagactggattaatttgctagctacaaaccactacttctattgagtacttactatttagcaattgtactgtgtaaacaccgtatatgtaatatcatttttaactttcataatagtcccgagcaggaggtgttgttatcccaattttagagatggcagaacagagatttagagagagaaaatactttgccaatctctcatcttgataagaccaagatccaaatgacacggaagccttcaagctctaaagctctttgctattctattcttagagtctcctcagggagtcaaaatttcagactgggagatgacatggaaggtgatctgattcaattctctattttacacataagttgagagacttgtctaatgacacaggatgtgtagaaacatatggcccaaggccaaaaaacaaattcacaagtgcatgtcccatatatgtaccgattttgtattgagtttcctcaatacaaaatcagtagaaggtgagttctggaatttttaaaagttattttaaggtaaatgtggcaagttcacaaatttagggaccaagaaaagaagtataattaccaactaaaagaggaaaaggaatggtcacctgaagtaggtttgagcgtaggccgacaagaggaaatctgggggacaaaaagaaaagtgtgtgtgtgtgtatgtgtgtgtgtgtgtgtgtgtgtgtacacatttagcttaaaatgacagtgaagtggccagaaaaaaaaaaatcaaatgaaatggccaagggtgcaggaagaagaaatgactgggcctctgcctgatcagacagtaagaccctgggttgcttatctggggagatgggatgggtggagaggcaatcactcatttcttgttgtttgttttccttccattttgtgtaaagctaaaaatgctgagtgtctaacttttgaaagttggcctattgtttcattttactgaaaaaaaaaatagaagaaaatgagtcatttggatttctacacgttccccacaggatcctaaattacaagtaataccaaaatcatcctttcaatgtttactgcaagccaaaaatttccctttaaaatctgatgatagctaaatataaatgctatgaccccaggtttgcctttagttcctggtgctgcatttctgggacctccaggggtggccaggacaagatgctgaactttgctgaaagcaagtttgcctttaggccttcaggctttccattttagtggcttctgcctccttctgagggcctacaatggacaccccatccctacaccggccctacatgctagacttacccacttctctgcctaacttgtccctcttaaccaaggagcctactagccttcagtccttttctctttcgcttcccaaaatatcaacccttgacctcagaaccctgctctctacaatcttacaaactcatttacactgtcttgatcatcaatgagttgagcatttcaatttctcaaaaacatttaattccttacaccataccccatcccttttaagtaggagacacaatgctttactcagaataaaacatcccatctaacataaatgttagaattatgggcatttgagaaaggtagcatgcttacgattctctgatcttggtcttatttcacaaatctgtacttttgcacaagctgttttcctgtgtagactgtcttctcactctacttagcctatctagtgaaattcctgctcactgctcataaaccttccaaacatgatcttcacccagaaaactttatctgattactctaaaactgtgttaacacaggagccactgaccatgggatgctcttgaacatctgaagtgtgactagtccatttagtgatgcactaaaatgcacatcagatatgtaagaattgtgtaaaaaaaatggtgaatcacaaggtcaggagttcaaggccaggctggccaatatggtgaaaccccttctctactaaaaatatacaaaaattagccacgtgtggtggcaggcacctgtagtctcagctactcaggaggctgaggcaggagaatcacttgaacccgggaggcggaggttgcagtgagccgagatcacgccactgcactccagcctgggcgacagagcgagactccatctcaaaataataataataataatgataataacaacaataataatagtaaataaataaattttaaaaattgctatattgattgcatgttgaagtgatactattttggatataatgggttgaagaaatatattatcaaaatcaatttcatctttctttttacgtaagtggctactagaatttttttcctttttaattttttaattgagataaaatatacatatataatttaccatctttgcaatttttaagtgtacagttcagtggtaataaatatattcgtattctttttctccctcttcacctttgttcccccactcaccctgggacgagaacatttaaaattacatatttgacttctgtttgtggcttgcattagatttctattcgatagtgctgccctaaagacgagtggttttgaacctgcagggggagatggataggatggttaaattgtctgaatgtctgttaaagtgcacattggagtgaaataatctatgtttctgatatatatcaataatataccaagataaccaatgaagagcaaatgcactgggtctttggtgttccatcaagcactattcatcttttgttaattttgctgcaatcctcattttctccccaccaacccttaaccctggggatgaaagagatacagtgtggtggtgcatgaagagtcttttgttcagttgatcaattcctagactgagcagacaaggtaaaatatgatccagttaatcataaacaactgtgggaaaaaaaggaagaagaataaaggacgctcatatcagctgcaacatgcactgctaagcattttaacataatcagaatttcctgacctgtgctcagtggaacacaggttctgagggatgttcatagtgttgtgttgggagtggggaggagaaaggaggtttcatagtgaaatcagactggaaaatgctggcctaaacaaggttaaccagctttctttattgcagtactttacagaacctttagtatgccatgaaacattgtgatcattcaaaagggaaaaaagaattgttttccaacttatttcatcacaaagttcttttctgagaaacacctatcaacatctctggttggtaaatttgtcatagacaatgtcatttaatgtgcatttcacatagaggaccctgtggcttaagaatgtaagtgacttgcccaatatcgcagtgttacacaactcattagcggctgagccaaaactccaaattcacatttataccagaggaaataattaactgtggtcagaacgggcaaatatcatcatgaaaaattctcaatacatatagaaatatgtctgaaatgacttagtcactttccctgctaggtcccgagcgcactgcccctcagttcattttctgcttctactgtgttctccttggatgaaagagatctcctcttctgaattttttagtactcctcctgtgggtcttggcacatattgctttcttgttaactttttatatgtatactctccaaacagattagaggcttgcagtggtattacttgaattccctacagtgtgtcttgcacgtagcaggagctctacagaactttctcagtttattaattaccggccctcccagctattgatggcttgtagtgtctttttacagtatctaaatgctgcagaagcattggctcttggttcacagacatcacaggttcacctaggctgccaactcagtatcaaatagcctgatgttgaacactgacatacctgtaaaatgcaactcatgatatcagatgcgatttttgcatgaggagtgtcttcgtctttcccaaagggtctcaggttatgttccaagcaggagtcccagagccccacaagggcctttgcatgcttttcaatggactcggtctctctgatggctgttgtgattcttgtgatacagatttcaactactgcctggtcattgttattggtttggtaatcctgtttggaaagaaaatcttcatgttaaataatactctagaaagttatccttcaaaggacaaaatactaactcagtcatttagaaaatgggtgcaccaggctgtgtgctaaggggtgagggtgtaaagcctaatacaataaaggcttccttccttggagatcctaatcttgtggaagaggcagatacacaaacatgctaaaatggagcaggttctactatcacccttagacagggatccctgagagtacacaggcgcttaactattcacttgcaagtgggtttaatctttagactatttcagtttctaagtccattacagggcaggggttactttttactctgacatttcagcaacttttgtgaaatgtttcaaattacccttcaatttcccctcattagttttctccctctttctggacataatggaacacatcatttcatctctcccttttcaactcaaataactacaaaacccattttacctttccccaaccaggttttcctccattcccctgtcttaattctccctcaaatacctgatcatctttactgagaaataatgggacctccaaaacatctaaatgtgaaaaacagacccactgcattaatttggataattggtctgactgtgaacttcacatggtggactcacaaaactgaaaatataatagagcaggaaagtatttagagcctgacatcatcatgtgagattagagatgggaagtgatggggtttttcggcactacagcaaactccagctgtaacaattttctgttgctataactaataggacagtaaacatcttgtgcatgaagctctctctacattgcaaattatttatatactagagcctccagaagtgaaaatttctgagacaaaggacaggcacatttttaaggctcaaaataggtactgttgaactatgttccagaaaggttttacgaatgtgaactccctccagctgggtaatagaatgatctccttattgtacacttacaagaacagagtatttataatatttctaatttgattagtgagaaacagtatcttatcgctgttttgcttaggaatttccttgcccaaaagtgaggttgaatggttctgtgtttattggctgtttgtattttctcctttgggaactacccacggtaccttatatatatttttctttaggtgacctcatcttttttttttttaatccttctttggtacaatatatttttctattaagggtattaagtgaatatttgacatttggctgcaaatatatctctacgtttcattatttttagtttttttgctgctattcaatgacatcctaagattttaggtaattaaatttgtcaattttggggccttattgtttttccttttctaaattggaaacttaagttgtttacatttttttgaaaggtaatacataaacatcgtacaaaaattcaaaagatgcaaagaaagggtttacagttaaaagttaatctccctgtcagcgctgttcctcatccgtcccagtccccttcctcagcgggagccaggctcagcaaatccttatgtttatacagaggcattctaagcacatgcagatattatccacacattctcctttctttctgtgtgattcctgtaacagatttttgtttaacttcaagttttccttattcaaaatttgaataaaaatcatctctacttttttccagattaaaaagaacttcacaaaacactcaccatttattactttagaaattcatcttttaaccatttgcttagctcttaaatctatctggtatttatggaaataagtagaaatgtacattttcttctaaatagctaacctaatcttcctactaccatttagtgaataattcatttcctagtaattgttttaaatatatcagattctatttcagggctgtcttttctgtctgccatttctcaattcttttacaatactaattttgcaactttccctatgtaagcttcagaatttttttttaacttttattttaagttcaggggtacatgtgcaagtttgttatttaggtaaactcgtgtcatgggagtttgttatacagattactttgtcactcaagtatcatgcctagtacccattcgttattttttctgattctctccttcctcccaccatctaaccactgataggccccagtgtgtgttgttcccctctgtgtgtccatgtgttcttatcatttagctcccacttaaagtgacaacacacagtatttgtttttctgttcctgcattaatctgctaaggataatggcctccaactccatgttcctacaaataacatgatcttgctcttttttacggttgtgtaatattccatgctgtatatataccatattttctttatccagtgtaccattgatgggcatttaggttgactccatgtctttgctattgagcttcacaaatttttgaccatgtttcctagtgtattttgtctttttgttgttgttaacaaaatattttttctcattagaacttttaattagtttttgctgattaaatgaacctttttttttttttttttttttttttgatggagtctcactctgtcacccaggctggagtgcagtggtgcgatctcaggtcactgccacttccgcctctggggttcaagcaattctcctgcctcagcctctggagtagctgggactataggagcatgccaccacgcccggctaattttttggatttttagtagagacagggtttcaccatgttagtcaggatggtctcaatcccctgacctcgtgatctgcctgccttggcctcccaaagtgctgggattacaagcatgagccaccatgtcgtgctttttgtatttattttgtaacttgctctttagcttaactacacttaattatgataaattttcaattcatcatcttgggttttctaaaaagatttttgtgtttcatgcagcctttctgagatctatatattttatatatcccatggcttattatgttggctagaatcttctatgctatttcacataaaagtgattagaacaagaatgctagcttagttcctagttttgattcttgatttttggcataaaattttatggtccagaaaaacaaacaaaaaaatacagtaaatgttttaaatcatatagaatacatcactttctattttcaaggtttacatatttgatttaatttccctagtaagcattatgctggctttttgggtgagagattttataatattataatttacaatattaaagaggtatcagtctattgctatttattgagtttatttttaaataaagaataaattgtgaatttcattaaatgcctttttagcatttataggtacatcaaatatttttgtccttagatctatcaatatgataaattacagaaacaaatttcccaatattagttaactttgcattcctggaacatgttgtactggatcttgggaaataattttttaaggtgctgctaaattctgtttttagtatttcatttaaatttttttgcgtcaatatttggtcttatgtttgtcaggtttcgtatcaattttatgctaagtccataaaggattttggaagatttaagctctctataatcttacttattatttgaccttacagtggctcaacagaagtgaattaacatttcctgcaactaatgtgtctatctgcttttactggtatctcctggagtttttctttatgaattttattgctatgtaatttaacataaagatattcttaatctttataactcttgtgaactaaatccattaaaaaaacaaagtgcctttattttactgaatgcttctggcatgaattttttcttatctgactaaagaacatgatccctgttccttttggtttacatttacctcatatcatttgcctattttattcttatttttaaaatttattttacaacctatattgtatcaagtgagtggttgttaactctctttctgtaactttctaggaaataatttagtagcatcattcaacgattcttaatagtaaaaaatatgcctagtacatagagtatacagaagtccttgatcatcgtctgggtccaaaccattttatcataatcaacaatttaagcatggtggagctacatgtagacttcacaggtcttcatttgagaacagagggccctgccttagcaaatgagtgggcaaactctcacaattttaagcaaagaggattagttttgactcagcattgattttctgtgtcaaacgattatttcctgtgctttatctgttaatttggcatggtgttaaaaaaaaaaagaaatagcctatatattaggtttgaatatgtgatatggttttgtggtaaacatcaaaatgatttgctttaatttgaattattcacatgtgttttatagtcaagtaaatcattgtttaattttgcatctttttattttagattttctaatttttaatttttgtttttttttcagacaggttctctctgccacccaggttgcagtgcagtggtgccatggctcaatgcagcctcaacctcctgggctcaagggttcctcctatcccagcctcctgagtagctgggattacaggtgcatgccaccattcccagctaatttttttaatttttttttttttttttgtagagatggagtctcgttatttttccctggctagtcttgaactcctaggctcaagtgatcctccccaccttggcttcccaaagtgctgggattataagtgtgagccaccatgtccagcctatttttacattttctaaatcatttcctaagtcattaaatatatgtctcttctttgctagattttgcccggtgatctaatctaaaagtctttttaaaaaaataggtgcattttacccatttatataaagtgatatgatagatacatttggccttaaacatgtcatattagctcatattacgcttgagttttttcttaagttttgaagttcaagaattttactaagaagtggtacattttggaccagacatgaaaaaagccagagtgcacaaataagctgtgtgaacaggtgacccggacccctgtgtcatcaaccactatagaaataacatcttacactcaggtgacacttatggccacatgaggggttccctcatggccagctgacagaggaggaaaatgtctcaacttggtttactgatgggttggctgggtatgtgggtgaaattcaaaatttgacttctcttatgtatagacctactcagggtgaccctgaaagacaaaaatgagagaacattctcccaacggtcagagcttcagccatgcacctgatcgttaattttgtgtggcaagagaaatggcttggctgaatggccaagggcctgaaaaaagaacgattgagaaactggaaataaggagctctgggtaagaagcatggatccacacatgggattggacataaagtataaacatcttttatgttcatgggaatattcactacacaagaggcactaaaatacaaagcagagggaatgactcagccaaatgacatcaaccaagcctctgtcatcagtcactccagtgtgatccagtcagcacataaatggagtagccatggtgagggatagaggctaggcatcacccaccactgccttgatgtaaatctaccagcaacagaggcccctgctaagtcctcagaatggcaccatccctcaaggaaacaaatcaatcacttggtggcaagttatttacattagaccttttccaccctggaagggacatcaatcatattgagtggaatttacacgtaatccaggattgggtttgctttttttctgcccacagggcttaagcctgattcactatttgagggatcacagagcatttggtctgctgacataggattctacataacactgcatcaaaccaaagaaccattttatagcaaaggatgtacagcagtaggcacataatcatgggactcactggttctatcacataccataacttcttctgcccccaccccaatactgctagactgatgaatcaatggagcaggcttgcaaagaagccactcaaccttatatcctgttaagatgaaacaccattctccaaggggcagtacacatactaaaacagtgaccactgcatggtactgtattccctgcaggtagaatacatgagcccaacagcccagtcacctcaggttctttgtgtcaaggggaccagcagattaagaaaggagttgccaacctggcaggagtaattagccatgcccattagaagacagtaggctgctgttacacaatggagatatctcttggtactcccttgcccaattttgatggtaaatggacaatggagcagtcacaacctgagaaaggaatggagtccagggacttagatccctcaagaaagtgcatctgagtaactcaactaggaagcaacttagattaatagaggtgctagctgaagatgaaggaaatccagaagaggttgtaaaggagggatactgcatttgtcttcttgttatagttgcaaataattatcacatacctactggctcaagaatttgtgttgagaaattaaagttctgcaggtcagaagtcaaaaatcagtctcactggactaaagtcaaggtgtcagcagggctggtgccctctggaggctctgagggcattttttttttttttaatctgttctagcttctagaggccacctgcattccttggctcatggtcccttcctccatctttaaagcacatcacttcaacctctgcttttatcattccctctctttcttccacctttgaccttgtttccccacttataaggacccttgattatattgggcccacccacataatccaagatgatctcccaatctcaagattattaattatattatatctgaaaaggtccttgcccatgtaagattacattcacaggttctggggtttaggatgaggacattttttgtgggccattattcagcctaccacagagatgatgcataccaattgcagccttgataagaactggagtggtggacacttgacttgggcacaaagtataaacatcttttttatcccatgttaatgcccatgagagcattcatcacaaaagaggcaataaaacacaaagtagagagaatgacttatctaaatgacatcaagcctctgtcatcagtcactctagtgtgatccaataggcacgtaaatggaatagctatggtgagggatagaagttatgcatcattcaacgctgccctgatgtgaaacctgacagcaacagaagctaatgctgggcccgaagaatggcaccatccctcaaggaaaccagttaatcacagacatgttagatccccttctaactttcttattataaatttccttagaacaagagatcaatcagcttatcagagaagctgtttccatatagaataaatttattatacaaagcataccatttagaacagttctggggtagactatagtggacatgatgatacattgcccaaatcccctctccaggacctaggtactcattctctcagctgttggtttgtagccaagtctgcctatagaaattttctgtggtcaaagggaatggcctcattcaacattttgctcctcccattggacaacctgcatccaatgactagtcatcatggagatatgaaggcctggtcccttgtcgtaggatgactctgaagggtcatcccagttccagaggtccctgtgagagattagttgaggcctttttttcacagctgcattacagtgcaaatttttcctctgcccaatcctgcttcatctaccccctaacaggtattgtttctcagagcactcccctataaatgttctgcatggtaatcaccatttcagagtctgttttcctgggaacagtttatatagatgacactgagaagcatagcaaacaatgtccaaataatagtttattaataaatggcaatgagatgtttgtctgaatgaaacaagcctcaataaaagtggaaggtgcaactcaatgaaaaatacatgacagtcatctgtgtcttggtcatgaacactagaactcagtctccatgctaagaaagtaatgaattatcagagaattttgaaaggggcctttcgaatgaagccattgtgtacaggatcgtgtcagtgacattgttgaacataaggcaaatatcctatgatttctaactagaaaagttaagcagctgtccataaagataaattacttcacattgttcataactgcagcgaatatagtaatatatcaggtatagatacatcagttatgaactttgatattactgtgagccccttaaagctatgaatttcttattacacagcactttactacaaagagatttttcaacttcaaaaattttatatcttcaaattctgtacatggcatgaagaaaaaattctccaaaatgagatttcctccaaaaagggggaaaacctgaataaacagttaactgcttcctttaacaaatattcaaaaagacaaaaaaaaattttaacctgttttagtggtataattgaatcatttaaagcattttggcaagggatcagctttgcaattagggtttttctgacttgcattccagaaaatatcatgttcttttgaaatacatatgtgtatgtgtttatgtttgggctcgacattgggtcagtacctgtgcatattaaaatgagcaacttctaaggaccaaatctatttaatgtcaaacccatcaagccagacttagagagtcattctcacagtgacctagccattgtcaattttaaagtaatttatcctaaagtggtggggtgtcaaatgggagaagtaggacaacgaaaaagccacaaattgtgctgctccaggcttgtttatcaggatggttcactctcactcaacacacctccgcttcagcattcattaaccttttatgtcactcttacctactctgaaagcagtcttcagggaatggcccactggcaaaagggagggaatacctcagataaagcagttggtggtgggaagaatgaatttggcatgggagtggaaacttgaaagaaaagaatggagagtcctaaggcaaaggatgtaatcatttctccctcccttcctttagaggctgcatagcatagtggttaagaacatggactgcatcagaatgcccatgctaagggctcggctctgcttttaccagctcttcacaggcaatcactcatctctctaagcctctgtttcctaatttttaaagttagaatattgttactatctggctcctaggattgttgcaagtattcaatgagttaatacatggaaaggatttacaacagtgtctggtgcacagtaagtgcagataaatgttagctattatttttatttcccttaaggataccataaccctaaaagccagctttgggtttataacctacagtgagttacaaattctttctttctttttcttttcactttctctctttctttctttttctttcttttctctttctttcattctttttttctttctttctttcctttttctttctttcctttctttctttctgtctctctctctctctttctttctaatagatatctttattgcatttccagtgttcttcatttttttggatggataaaagtgtctgaatatattatattccttatctctgaagaatttctttcatttcttgttgagtaggtctgttgccaatgaattccttgtttttatttgtctgggaaagtatttatctctcactttctttttaaaaattttttataatttcaacttttattttagattcagagcgtacatcagcaggtttgttacaagagtatattttatgacactgaggtttgggggcataaattatgctgtcacccagctagtgagtatagtacacaataggaagtttttcattccttaccttcttccctccctctttctctagtctccagtgtctattgttcccatccttacgtctatttgtacaaatgcttagcccccacttataagtgaaaaaagtatcatatttagtttctgtttctgctttagttcacttaggataaatggcctctagttgcatccatgttgctgcaaaggacatgactttgtttttatggctgtgcagtatgccatggtgcatatgtaccatattttctttatccattccagtgttaatgaccacctaggttgattccatgtctttgctattgtgaatagtgctgcaatgaacataaaactgcatatgtctttctggtagaataatttattttcctttgagtatatacccagtaatggaattgctgggtcaagtggtagttccttgttctttgagaaatcttcacactggtttccacagtggctgaactaatttacattcccaccaactgggtataagctttcccttttctctgcatctacagcctcaccaacatctgctgttttttgactttttaacaaaagccattctagctggtatgggatagtatctcattgtgattttgatttgcatttctctgatgactgctaaagttgagcattttttcatgtttgtcagctgcttatgtcttcttttgagaagggtctgttcatgtcctttgcccactttttaatgggactaattgttttttgcatgtcgaattgtttaagttatttattgactctggatatcagaactttgtcagatgcatagttcacgaatattttctcccattctctaggttatctgtttactttgttgatagtttcttttgctgtgcagaaagaagctcatggattggaagaatcagaattgttaaaatggccatactgcccaaagcaatctatacattcaacacaattcctatcaaattaccaacatcatttttcacagaattagagaaaactattctaaaattcatatggaaccaaacacacacacacacacacacacacacacacacaaaaaaaaaaaaaaaaaaaaacaatcctaagcaaaaagaacaaagttggagacatcacattacctgacttcaaactatgttacaagtctatagtaactaaaacagcatggtacttctacagaaacagaagctctttagcttaattaggtcccacttgtcaatttttgtttttgttgcaattgtggttgaggacttagtcataaattctttcccaagaccaatgtccaaaatggtgtttcctagattatctttgaggattcttataatttgaggtcttacatttaaatctttaatccaccttgagttaatctttgtatatggtggtaggtaggaattcagtttcattcttctgcatatggctagtcatttattgaatagggtatcctttcctcattgcttagtttttgactttgtcaaaacattgctaagtttttgactttgtcaaaacattgctaagtttttgactttgtcaaaacattgcttagttttgactttgtcaaagatcagatagttgtaggtgtgcagctttatttctaggttctctattctgttccattggtctatgtgtctgtttttataccagtaccatgctgtcttagttattgtagccttatagtatagtttaaggtctggtaatgtgatgcctccagctttgtaatttttgcttaggattgcttcaggtattttgactcttttttggttatatatgaattttagaataggttttcctaatattgtgaaaaatgatgttggtaggttttttgtttgttcattttaagacagagtctcactctgtcgcccaggctggagtgcagtgatgggatcccaactcaccgtaacctctgcctcccaggttcaagtgattcttatgcctaagcctcccaaaatagctggaaccacaggcatgcaccaccaggcccagttaattttttgtatttttagtagagacagggtttcaccatgttggccaggctggtctcaaactggcctcaagtgatccacctgccttggccccccaaagtgctggaattacaggtgtgagccacccacgcccagctgatgttgatagtttgataggaattgtgttgaatctataaattgctttgggcagtatggctattttcatgatactgattcttccaatccatgagcatggaatatttttccatttgtttgtgtcatctgtgatttctttcagtagtgttttgtagctgtagttgtccttgtagagatttttcagctcctttgttagatgcattcctaggtattttagttttttgcagctattgtaaatgggattgtgttcttgttttggctctcatcttgaatgttactaggtatagaaatgatactgcttgttgtacattgagttttgtatcctaaaattttactgaagtcgtttatcagttctaggacccttttggtggtatctgcagtgttttctaggtataaattatgttttcagggaggagagatatttggacttcttcacaaacattttcatgtgtggttgatatttttatacatttattccacaactacttaataatgtattgaacaaggaccacatagttattactgttatagtcatattctacattggcatccatactaataatcctttatattttcatccttctttccacttttaaaagcatacacacacacacacacacacacacacacacaatgtgtatataatgatacattatgccatttattctatcacttcaagaatctccaaagccaagacatcaccaccactaacaacaagtgagctcagaactgacagtattgctgggattcctagcagaagcaaatacaaaccactttgaaggtacaacactcaacacagaccactcagtacttacacaaataaaatcttacttatgctgaacttaaaaatttaatattacaaaacacccaagaaaataaggcaatatgagcacatgtaagcagattaaacacagagcagattagatatttaaaaatttcaggtaagaaattattgacctcaaattacaaaattatatattcaaaatcaatgtataaagaataattatttttattttaaaagaccaagtcacttttttaaaaaccagaaattttgtttttaaaaaagaaatctctagaaattaaaacctcagtagatggatgaaaccgtggatggatagagctgaaaaaaagacttaatggattggaagatagagctgagaatataatatctcacatagagatggaaaatataatagatcaagaaatattgaagataaaataggacagaatacgacggataggagggcgatgattttgtctgttctttttttgtactattatgttctcaatgcctagaatattgctagaagagagtatgtactcaatacatatttgttggatgcacaactgagtgaataaatatcatttctaaaaggaaagattagatgtgaaagttaatatttgagaaaaagtttaagaactttacaaaattgaaaaaagacataaaaccctcaaactcacaaaacacaataaggattgagtaggaatatacaaataaaactatatctagacatgtaatagtgaaaccatagaacaccaaaggcacagggaaaatattaactagagagaaaagtagattcggtataaagaaatagcaattaaaatgacagcacatttcataacagcaataatagaaactactgagaaatgaaatggctgccaatctagaaatgcatattcaggtaattattcaaaattaagggcaaaaataaggacttttttagaaaaacaagcatttagagagtttatcattaacagaccttcactgaaggaacttccttttccccaaagatggggtcttgctatgttgcccaggctggagtacagtggctcctcagaggtgcaattatagcatgctgcagcctcaaagtcctgtctcaaatgatcctcttgcctcaccatgctgagtaactgggactacagggacatgccactgcacttgctgaagatacttttaaaatgtatacttcagaaaacaagaacttggattcaggaaaacaaataaaaaagaaaggtgaaaaaagaaacagggaaatattaggtactttaagcaagcattgactatacatttttttaaagcctctcatttaaaaagaatagtttcaagggtattacacaggtaaataaaagtgctggttaataacatgtaagatgggcattaaagtcttccaaggtacttctaggaataggaggaggacagagttcctgaataactttagacatagttactgtaattaatcaaatgtaatatggcagcaatgagaagatctatgattatttcgtgtgtcatgaagaaagagaagagactgccagttaaattgtgaggggcatcatgcctccaagagagtcctatacaggatattaattgagcatactagactctcatttccttgaaatttctttcatctatgctaagagaattgtccatttctcctgccctcaattgtattacttattatagtgtaataggtaggtgatcttttaccaatatctcagtaacaaaaactatattcttttttaggttccatatagtgcccagttattattttgcaagaaaatgtggaattgctgtcattcccccaatgattggttaactaatataaaacttatataccatgatgctattctgcatgcctttctgcatacacaataagtttctgtttcagtgccacattatagtctagtagttttgaaaacattttaaatggatatttaactcaacattggtaggaacaacaaggtatctaattcagttagaatggtaacaatatgaagaacaatatgacaagttcctgcacatgtaggccatgacaactatgtatgactactgcctggccaacagcaattggaagattgtcatcaattataaaacacatatttatttcagagattttaatatgggaaaatgtctatcttagaattgatgaaatatcatcagtatgtttgctaaaatgttaaaggcaactatattaaaataatagaaatagaatatataatcttcaacccactagtcccaagagtggcaggaaataaaatgataaaaactcaatcaattaaaaattttcagaaaaaatataaaaataaacatggaaaagtcagaaaatacaacacaaataaaatgaagaaatacatccaaatagatcgcttatcataataagtatgagttgactaaatttaccaattaaaagacagatattttctattttgattatttaaaaaatctacttatataacatttacaaattacattaaagtcatcatgacatagaaaggtaaaagtaaaaagacagacaaagaaaaaatagatatttctactccaaagaaaacaggcaaaacttattaggaataaaaatgctcagtatatactaatgaaaagaaaagttctccaagaaacaaataacaatctttaacttgtgcatacataataaaaaagcccctaacaagcttgacaaaattacaaggagaaattggcaaacccaaaattataatggaaaatgtaaaacatatctgttagtaactgatggtccaaacaaatgcaaacttattgaggatatacaaaatttgaacaatatcattaacaagagttatttaatcaacatatttaatatccaataatatagatattaagacatccaataattagagaatacacattcctttcaagcacatattaaacatttaaagaggcagcataggccagacacggtggcttatgcctgtaatcctagcactttgagagaccgaggcgggtggatcacgaggtcaggagttcaagacaagcctgaccaacatggtgaaaccccgtctatactgaaaatacaaaaattagtcaggtgtggtggtgggcacctgtaatcccagctacccaggaggctgaggcaggagaattgcttgaacccaggaggcggaggttgcagttagccaagattgtaccactgcactcgacagagcaagactctgactcaaaaaaaaaaaaaaagaggcagcatagtttggtggctaagaatagcttctgaactcacattctgggcttgatttttggttctaccagttactagctatacaaccttggtaaagttacattattagcctttctatgtctgtttcctcatctataaaatcggaatattagtatacttatctcaaaaatttacttaaataaatatattaatgtgaaaagctcttagaacagtttctggcacacaataagtgctacataagtattagctattataatttacacagattagccataaactctgtaacaaagcaagtctcaactacttcgaaataactgataccatgcagttcacattctctgactacatgcagttaagatttaacttaacaacaaaaagattataaaaattcttggggaaattaaaactaacttctaaattacttgtgagtcagaggaagtcacaataaaactaagaaaatatttagaatttacaataaaaacatatctcaaaacttgtagaatgatactaaatgttacttagcaagaaatttatggtcttacatgcttatattggaaaataagaaagttaaaataatcaataacctaattatacaattgaggagactaaaaaaaagaacagcagaataaagctacagaaagtacaaaaagtaaagtagtaaagacttaaaaagaaattaataagattttgaaatgatcctatacagatgatcaataaatcaaaactttaaaaagtagaaggcaaagctttgaaaatatgggtaagatatcaatgaatacagaagctgccaaaaaataataattcaaacaatttgatgctaataaacttgaaaactcagataaaatataaaattgcttagaaaatatactttaccaaaagtgactgaagcaaaattcctaattttcctcaaaaagattgaatcagtagtttaaaaatctattaaaatacacaaatttatagtgccagagagttttatactgttctatgaaatctttgaggattaggtcacaatattacaaaactcttgcagataacaaaatgtggtaacatttctcaactcattttatgaaactactgtatataacttgatgtcgaagctaggtaaagacagtggaaaaaggacaattaaagaccaatctcatatataagcatagttctaaaactactttaaaaatagcaaatcaaattttaaaatgcattaaaataaacaacaaattttattttgctccaggaatacaataatggttctatatttgaaaaatctattactgtaattcaccacattaacagattaaaggggaaaataggattatctcaagaggatagaaaaatcagttgataaaattaaacaattcttagaaaaacaggaataaatgggaacctccttaatctgataaagagcattaaccaaaagcctggagcaaacattatgcttacactgaaaagtcagaaaattctctttaaataaaaagagagaaggataactcattctagtcaatctagttctggagagctagtcaggatatgagacaaagaaatcaaataatagaataaggattggaaaggaagaaacaaaactataattattttaaagtgatgacttacacataaaaaataatcaaggaatgtgcttcttccatttaaaacatatttttttcttgattctctcctctctccccatctcattctttctaaataccagcccatttctctgatctttatgggaaaatgcccagggttgtcactgctcattttcttcaattctcttcccaccatctgaaactaactccaatctggctttcagtctgacccatccagtgacaactgctcttgtccagtcataatgaccttcatgtgtctgaacctcagtcaattctcagtcttgaccaatcagtgacaaatctcatttgaccaatcagtggcatttgacatcactctttccttgcaacagcttattcacctggcattcaggaaaccatgattttctgactttctttctttctttctttttttttttttttactggatatttcttctcagtttattttcctagtccttcatcatctccttaacttctgagtactggactcagtctttggactttttactttctgtctgcactcactcccttggtgatctcgctcagtctcaagtctgacaagttccaaaattataatggccagcccagacttctctcctgctccagactcatacatacaatacttgcacatctccactcagaattctgacagctcagactttacacatgtaaagtggaactcgtgattcttcctacactcccttcccctcaccctccctttccaaattccttccttccttggtcgtcttcatcttaattattgacaattttatcatcctagtttttcaggccaaaaatcttaagttcgttctctctctctctctctctctctctctctctctctttctctctcccccttccccccacctccccctcttcatcacatgcacatacttcagcaaatcctgttggtcctatcttcaaaatacatccaggatcatctgaacacttaccaccaccactgctccatgatggtcagaacctctgcttcttcttatctgaattatttcagtagccactcaactggcctttctgatttcactcttgcctttccacagactgttcccaaaacaggaatagaaaaattagaccatgttacttctgctcagaactctccagtggctgcccaagactccaacaatccagcctccacttctctcctaacctcatctccctttccacattgttcccttcactacagccacaccgacctcagaaactccagcctacaacctcaggacttttgtacttaatggtccttctgcctgaaatgattttctccagtacagccacactgacctcagaaactccagtctacagccttaggacctttgtacttaatagttcctctgcctgaaatgatttcctccaggtacccaaaagtattgctctctcatctccttcaagttttgcttaaatgtcagcttttgtctcagtatggactaccttgtgcaccctatttgaaatttcaagcctccgatatcctgtcactgccctctgcgttaattttctacatagcacttacttataatcttctaatacactacatatcttccttatttatttgtttattttctgtcttacccaattaaatggatgatgtcagagggctttttttttttgtcttttttgattacccttctatcctagcatccagtacagtgtctgaaacatagtagacaactaataaatatttgttgaataaactggaaaatgtatatagacaaattattaggattagtaagagagttgagtgagtttgctgaacataagatcaccatacaagaatcatttatgttataaccaactgaaaatagaattggaaaatataattttaaaaaagaatattattatattctcagaaaaaaatataaaacacttatacatttaacaaaagatgtataatattaacattcttaggaaaaatatcataaaacctctttgagcaacatttaaaaacatataaataaagggatagaaatgtaatgtctatagatataaagacagtagtacataatgatgttaattttcttcaaattaatctatagttataataacacccagttaagatactgatagaattattcagaaaacaggagaagcttaatataaaattattaaagaacagaaaaaaacaaagcagtgttaaagaagggtgggaatactgtcctatcagatatcaagacttattacaaggtaagagataaactgtgtatcagagtgagatatgcaacctgcataggtgacaaaggactaatacaagaatatacaaaatagtccaagttaataaaaataagattttaagactacaaaagaaaaaagaaaaaaaaaacataaacagatacttcactggaagtaaagtggtaggcacttccttcagaggaaaacaaatggcatacagcaaataagcatatgaaaaaatggtcaaccttggtaataatgagaggagtgtatatttaaacaattacatgctgcttcacttagattaaaaaaaacttttaaaatctgataaaagcaagcactggtgaggatataaagcaactggaactttcatacactgatgttgggtgtgtaaactggcacatccctgttggaaagcaatttgttggtatatcacaaagttgcaaatacacaaaaccctaaaacctgttgtttcacttttaattgtgtactttagaaatacttggcaattacaagtatttagaactttagaaataattggccaaaattgccaattacaacaatgtttactgtagcactgtttaaataataaatataaaccaaaaaaagaatggatacattgtagcacattcacataagggaatactctgcctcagcaaaaataaatgagttgaaactacctgtaccaatatagacaaatctcaaaaacgtaatttgagccctatgacaacatttatataaagtttaaaaatacaaaatactatgctgtaattcactttggaaccatggatgtgtagcaaaaacaaaaacaaaaagcaaccatgcatagctaaataccacaaggaggatattggttaccttgggaggcatgagggaggagaattggattaaaaagagacatgcagggattttcaattgtacctaacatgttaaagtgggtgattctgtgtgcctggtgtgtttcattgttaaaagaaaaataaagagaactggaaggcgggtggatcggttgggcatgaggtgagcaccaatggaaaggtgggagaagtggatgagtggatgagacaatctctcttggagtagcctgggaggaaagccaagttagtacaagtgattatcaggtaaaactggtctagaaaggacttgaaatgaaaagacaaaacttaaaggtatgtttgggaacttggagaggatactgagttgagtagtcacattttcaaagtgaaacataagggcaaaacatttcatagtagtattttgtagtaactggtagaaaaagaggacatggactggacagtaaaatctagtaaagtttaattatttttgtgagtggctttgggggaaggattggaggcttgtttgccacatttttggattccacaaagctgaaagtgctaagtaatatatttgacagaatcatgatgtttaaaagacatattctggaatgagggcttaaagacaataattttttttgcaatgttgaaaatgtggcagaatacactttaaaaaatttaaacttatctaattacaagtcttgattcaacctgaatgccttagcacatcacaagataaatgtggacaactgattttttaaaaacatagaatatttgactagtattagtagttgttctaagcaattggtctgagtattgggcaatgataaattacaataataaattaggactattccaaaggagggtaagcagaatgataagagtgtaggccatacctgggagcttcaatgaagccttctctaacaatgcagaaacaagattgtcctttgaggattaaaccaataaagtccactcatatgagtgggattagccagtacaggcctaaaccaagacattatcttttgatgggtgactttgcaggtgagttagatgtaatctcagggaggaagggctggaatgtgattgtcatggaggaggaagaaacctaatcaataaaagtatttcttatccaaagaaagactgagtaaacagacttgagaacagcatgaaacacacaagaattctgatccgtacgagttataattttcattgtaaatcagtacatcgtgttttaatctaatttatatttccaagtcttgtatttggatagcatgatttggatagcatttctcaggtaccaacaaaattgagttttccagatctgacagttgatggctacaacatgaggtgctgtaacctttcccagacacaggctccttctttgtcatggaaaaacccaaggtcactaagatgtttagctgggatgagacaagccagaggtgaagcctggtgcttatcttcaaaaggtttaaagtttttcttgtagaaacagagggtagactcttttgattgttgggggcagagaacagaacagagacaacaggtagaaagtacaaagtaagatttcatctggctaagcagaggaacatgttaacaatttgaactcccaacaatgaaaatgctctctctttgtcagggttctttgatcataagcaacagaaaaagtctgaataagtacagcaaacaataataataatagctataagaagaagattagaggtggcccacttatttgaaggagaaagtgaagtaccaggccttaaaaggagcagtgatcaaggcagctacaatgatagagagggaggaagtaaagtactgtttctttggggcaccgtcctcatgataaatcaccccctgctgatatctttcttaaaactactggggaaaaacttctgattttcaagcttgggccaggtgttcacctcttctctcccccaccactgatagggaagggtagtgggcactcatgagtagggaaccttgatggagatgccatcaaggttttatgcaatggaaagggacaatttaccaaaggaaaattgagaagcaggtaaaaatattagaaacccaccatattcgcatcattgcaagtgcaggagaagccacctatttttcagcaatcttctgtgctggaagttggaaggggcaatttagacgatcccttcctgttctacgtttctgaagagaaattgagaagtggaattgattactgagatccaaggtcattaggagaggcctagagaggaatagctggggctggatctgagggaaggatgggacgcagctaacagggatgtaagccatagagcaggcatggtggttccatgtgctaatcagaaaaggaagataaggagctgctggcattggtaacctcaaacttgatatatgtaaattacaagctaccattcttcttctgttccatgagagggttacagatagagaaatggaagaagtaagatgtggtaaaagttagtagatgaagaagacacacgaactcctggctctccagaactcctggtagagtgagatgctatttggacagcttaatgaatggacgatgatcctaatgacaagggacctgccagccttaatggctaaccagtggagttatataatagaactgagtcaccagtcctaaaattctgaatttgatgtctgtgaaacaaagcaattaatgatgcaaacaaaataaataactggccactagtgacctctagtggaagtaggctttagggaacttatgtgatctttgattactgttttgttttgttttcctagtaagaagatgaaaaccagtgtaattttcagccaactgatttgcagaggagtgtgaaagaaggggtttctgaaaacaggacaaaaatcttacccagaaaatgaaaatgtaccaggaacatgttgtgctttgcgtcaacctaagttgattaatgttctggaaaagatgtggatgagtaattgccatcaaagacattacctgagaaaagaagagttttttgagcagtgacttcattggtcactggggggagttcagcatgttaatggcagccagcaagagaaaataggcttgaagaggaggctgcacgggttgccagtataccttttaaatatatcttctttgtaacacagaagagcgctgttgtttctgaaatatgcacacatttgccaattcagtattgtatggcttgagtcccaccactttcatctttccaatgagtgtctgtgccaagtgttggctaacactgctgagctgggaggatgtgggtggatgcctggtggccctaggcctttgaagtgggaccagtctcatggagggtccaagtacaatcaagaaggtcaacatgaaaccacactgggcactccacatccatcccctttgggaagtgctttcagaatatataatcttgacattgaagagaagcgaaggaatgcaagtattgatgggaggttttacatctgtctgatcacactggggactaataatgggtgggtggaattaaatggcaggtccagggagtagggatgcaggtgggtagaaaaagaagcaagggaaagataaaaatagagacaatacagaagtaaacagaatcagccttattaagtcctgggcaactgtcacttctggcagcaaagcgatcgttgtccttgtctcatattacctgcgtggcaggaggtgtcatcctgccttctttcattattcagcctcccacacacaccctgctcttgtttactgatgctgttatgctgctctgcaggtctgcttttccctggattggctccctctcctctcagtgtcatttcaaggacataaaaatagcccctaaataatatttttgtgagaattccatgctgctctgcaattttcagaattctggtctttgtgagtgggcaaaagatgatctaactgccccctactaagccatgacttccctactgatatttcttagatgccaacaaaaccacagagcagattaagagagaccaatattagtggtatttcctctttcccctgcaaagatctttctgccaggatataaacaaatctctagctctaggacaggccatttcagagatgtagtctataaaccagtttacttactgaagatgagctaattatcttaatttgctccaaagcttctgtaaggctgtcttcaatctcagagtcatctaaggagaagaggtccccagctcgtgaaagatctttttgtcccaaaaccagtctgaacagttgatgcatggtgaggatgagtttgatcagttgactttctacagacccagagtcatgtgttccagttatcagaggtcagtaagacaaaaacatgtagaaggaggtatacttcttattccatgaaaggtcatttttctccagactttgaggtcttcattgacactctctgcaagggaaacaaatgacacaatgtagccactggcagaatggcataagctcagaatgtgaactcagtgtccagcggagagagagagaaaaaagaaacttggaaacatgtgcctagactaatagatcctggcttaatgatctttaaatgaactctttccttgtttttgtctcaaaaagtcttgtcaaaaattactaggtttctccagaatttaatttgaactttaaaagtcaacatgagccctacgcttttctcctttctacatccttctcttctctccatgtcacaaggaaaaacaacaatcatgcctaacacttgccagattttcctcaaaaagattctcatgggaatcaaacagaaagggagaacaaaaggaaaagagggagcataggaaacatctcctagacccacttccttgaaccctttcttccagaacctggacacagaaaccagtgcttacctcttggttgggctgccttgctacgctagcagtagaagttccctgctctgtcagtcaaaaaggtgacctcagtacttaccctactcctacgtactctataatcaagtagcaataaaataaagatgctgcttaggagaatggcgttagataaatctctactgaacatgaagatgaactttaacactgaaatgaacatgatagccttgccatgtgggctaaagaggagggctttgggatcaggcaactctccctctattccagttgaagtaataaagtcccactatatttctcacccaattaacagtctacagagaggagggcaatggcacaaattagacatctgattattctcatcagctcccttctgggcctaataaaatcacagaccatttgcactggcagagaccttagtaatcatttaatgtccagtgaggtttaatgactgccccaaggccccataatagctgtggcaaggatagtctactgatttcagtccagtgcacttccctcacagtttacagtagagtggaatcacctcatacatgtgggtagcttacaaatgtagccacatgcttagtgagagccaagagtgagttatttaatacaagtaataggcatttctacctagcattttactctgaatggtttgccagaaagagtgtgaaaagggagaggagaatctattgtttccttgggtagtctcagacctctcctctgagctattgttgtgagagcacctctttgtgttgagtgcaagtttaaagacacatactcttcaaacaccatggcctcaaaatacaagccaaagctttcattacacactcaactaaataagctatctgtagtattgtaagtggtacaattcatgagtcatagggattttaaggaaaatactctctatatgcaatttttgtactatctaccagcttttgaaaaatgaagcctaacacttacatgcctttatctatgtaccaggcataaacactttgtaaatattaattcatctaatcctcataactatatgaaaatatgtcatccccactttgtaggtgagcaacctgaggtagttaaataactgctaaagccatgcagctacaaaactggagagctggaatttgaacccagagactccagtagtgctagactccaagttcataaccattatgaaatattgactccatgtaaaatgtgaggctactgttaggagtaaaggtcctcagagcattattaatattaatgatgaaggtgtgagcagggttatcaagcaagaaaatgaattcctctccccttctacactgctcctggatccttgcccattctatgccctgagatttagagcaaccagagagcaagacagtcacaggagaagacgcttggaggaagagcaaaggagagtggtaagctttcagagggaggtggagcacagtgaggtactgcaaagtagttcgcaccctgggaaatgtgggagggtgaatcacaatatctctaaggaaaatcagcacagtgttttcctacatttttctcttaacacattttcctcccaggctcagatatttacagtgacaagagtctcagtaaaataatattcaggaaaattggatggaaatgacttcacctgacctgtcagcttgttggacatgtggcactccatgaagtacattcaactgccccagtcatagatgctcaggagctccaagaaggagcagtaatacgtgctggtacagaggagcacccccaggcttttcctgggctctttctgcacactccacatttacatgacacctggtgtggagtcccacattcatgctgccaacttcagctcttactcttgagggcccatcacatgcaaaacattgctttgggccctaaacagaaacatcaagttgtttaacacacagccatacaggaaagctttcacaaacataggggtggagtggggagaggtgagacttacacattatttttcaaagggctcttttgcacgttttcaactgtgatcttcaaaacaccttctacaatatgggagtgaccaagagaaaaatctcctggatactacaaaaagaagtttggggaagtacaagggagagagaagtcacttccaggggaagatgataatgaatagctttatggaggaaatggtatttgagaagcacctttaggatagctaagatttttacaggttttattcagtgcacttgtgctgagttcatactaagtcatctgctcatctaggaaccaagggtcatgtcccagctcagctattcagcgattataggacctttagttcatgttgttttcctttcttgagacttggttttcttatttgcaaaatggggctaatacacacctcgtctatttcatcagggtgttttgagggtcacaggtgataaagtgtaaacgagccctttataaaataatggcacaactgacatttggtgggtgtttgccatgtgtcaggtacttatctcagtgcttctcacatacttagccacttaattcttatgacaattccatgcaatcaaaaactgatgtttagagaggaaagtaaccaccagcagaggcacttgaagagtaagttgccaagtcaggattgaaggcagctggtctcccaggatagttgtattcatgactgtgtgagataattattattgagctgtctcccttcccatcagctctcatccaatgagtacctccacatgctgcacatcccttcctaaataaggactggcaaggcacattatttatttttcagcagctctcattaatattttgctcaggtgtctggcttctcctgctgttctttttgcaatagcagggaaggtcaaagccagatcaaattctacctcatgttctgagaaactccctacccttatgaatgtcatagtcctgtggcctgtgtgcacgtgtacatatacatgtatcatgtacacacaagcataccatatacacacatgcacatatgtgcacatactcaaaatactttctacacatcaacctttttgctagacactagatgctttcttcttttagttctcccatcaactctgcaggtagatattaccacctaagaggaaacaggaccagtgaggttaagtatcatgcccaaggttacacacagagccaatattcacattcaggtaggccagactccaaaatctcatattttttgtatgatttttaaaagctggcttataaaattcttacagcctttaatttgcttccttcataatttccttccctaatctttaaggggttctaatctgaggcccaccttctcattatttagtttttttttttttttttggcaggtatttgctggcgaatcagctttctgtagggagaaacagaaaccacaaaaacagaaatgatggcgcaaaacgtggcacatttcagggagtcacagctgtcccgcgcaaactcgactttacctgcgtgctactcctcaaaggcgcccttgcagttactcagctgcatggtttgagactgggcgggagattcaggcaggctccgagggcacagcgagtggaatccgctcagctcagtgaacctgaagttgttcattgcggagccggtgccgggtggaagaattcaaggaatgcagcctgatgccaccggcagccccagagaccggtcaggtgacaggctgcacctcacccagcggagttacctcccagtgcaacgctctgtttcctgaggtgaaacacaaagcctgctccagtaaaggagagttgtttttaacagagaaaacagaactccctgtgttcgtgaaaatctatactttcccagggaagaatggggggcgggggcgagccacgcaggaaacaattttcaacagaactcaagcaggtgaacggaatggctgtagggagccacctctcagagctccaggggaggagaagagaactgcagcttcattaacacttccctctccctgagatctcacaaacgttttggaaacactgagtgttcgtccagtaagagtcacctcctaaagaaagtatccctttactctgcctctagagtaaaattgttgaaagttgaagtatgcgggaagttgctaataaacagaacaaacttcacaacatacgtactctctttttttcgttatttgctgggaagctattcatagaaatccacgtggaccagaaatattggatttgtacttttaaatattgcagcaacactcaggcaaaaggtttatcctgcttaatctactgacactccgatggagaaaagggcactggaaccttcctttattctttaaacagttaacagtgcactttaaaaagcaaggtttttaagactgcattcttctcgacccctaagtcgtctgttcctgtggtagatctatagctatatcaaatcatctcacttctggcaatgtgtacaggcagctatcctgcagataatctcatctttgtgctcactagggtgtgtctactcaaagggtgtggtcagggtggccacagttaaaccaggtcatatgttccaggagaacgacctcgtaaatctgcctagacagttggtgatcaatcatatttttatgccatccacatttggagaactatccccttgaagaattcctttataaaaatcaagaatccagtcattcatgagtagctgtattttttcattagtagtttttctaatttacaatatactaatgaagtttcgtcttttaatggaatagatgatattgctttagccttcccttttaatcctctattcattattactgatttttaatccctagatttttatccagttttatttttttaaagggtgtagagtcctgaattggacactctatggaactccagtaagaagagcagagtgataagagtatgggaatctagactcaactggattccaagctcagctatgccattacctgcagtgtaaatgtgggcaggttaattagactccctgagcctggaattcctcctttgctcctgaggattgtgatatgggttgttgggaggtttaaggagatgatataaaacatttaacacagagcctggcatatggcaaccacagaaaaagtgccagcaatcatatccttaagagtactattattcctatagatggtccaccagttaacacatccccatgccataccttttaaaaattaatacatgactgtactgttcactaaattgggttcacagagctaaagatgtttaggttgtttccatttgagccatatttatatctttgttgtcctttctctatcttagtcatcctgtccttacctctgggttgttcacttttcatctgtaaacttcattctcttgaatgggtccctgttgattttttggcaaccttatcttgtttcctggagagatagttttacggtgatcctacccacaccaaggttgaacaataacagtgaatgtttttacagagcagaaatgggctagaatacaatgtatctcaaactttttgtggctgggtaatccaaacacctgagttttccatggaagtgtagcactccttcccgtgtttattagtgagaaaggagtggccctccagggctccagctactttctttactacttttcaaggtgacgtacactcaatgcccactaataaaacattagtggcttactctattatgcatctgtagattctgctaaatgaaaatatacatgaactggaggacttaatcgccacactattgggatactgcctatagaataattgaaactcttgggggagatttcaatcaccataattaactcaagaaaccaacttattctgaagaattcagcctctagcttgcaacttaggttagggtataccctggcttcctcacttcagaaaattctagaatgacaatatttatttacattacgctttagactacattactctgcatcaaaacattttcattttattcacctgtattaaaaatgctcattaacaaacttagacccatttgggctctagaaactttcaataaagttctcagatttttcccttgaaagaaaggattacagattcttttgaaggagcatctttttcacacagcgtgaaaggactacaggcgttcccatgggaattggctgcatacatttcagcccttcccacaagatgtctattgttccctggatgtctctgggcttccttggctgtggcgtgctgctacacttcacttctactgaaagcctctgagtctggcttattctaagcaatgctaaaggcttcagccctgtctttttgctagagtacatacgatctaagtttgtagcaggcttatttcataagtacatgaaaaaaatagatttggtgacctatttagtcaagagcccaaaaaactacttaattttgattacctatttcaacttattaaaacacaaataggaaacatttccttcaaaaaggatgagaaacacttatcttcaagtctaataaactttctaaaatcaaggcttttgtgacttgtcataattttatagtgtattcattttcacctgtaaatgttgactttgttggtcatttttgctctggaataatacaaatcttgctgaaaaatcctaattcaaattcgtgggtttgttcttccagaaaatgtaccaaaactctcaaactacatggaaaactcaatgttaaatgtatcttcatttacatttaagtttcatgtaccaaatatctatatgaccaactcaaatatttctctaaatatttttttctgctttttaaatcaaaaatatataaatgtcatttaatccaatggttgattactacaacaatttaagtgtgtatctgaaagagtaaaaaagtggttagatttaattatgatttgtaagatatctgaaacaccaaaggaaaaaacggcagcagcaacaaacagtaatggtgaccctgttcaacccactgactgtaatgatgctataatatttaattttctttgaaaatccgtaggcagagccagtttctttgctggttgcaaaatgttgattgaagtaaacaaaagtataaaatagaaatgagactagattattacggagtaaaacaaaaatgcacatgatatgaatctagaagcacagctttctgctcctgaggcctagagacatgttttaataacccacagagaagtggcatttttactctaataaccgaaatgcctgcatacatggctagacacacagctcccaaatgtgctttatctgcataatcagccagcccctggaagtttctcagctccattctcctatcccccactctttgcttctttgcagcctctgacatttactttaattagcttttgtttttgctgaacaaaaggtcatgaaagaagatagccatacctctttgcacaggaatctctggtcatagaaaatagaaggcaaaatccttgatctttagagcactgcagctgggacccatgaccatgctcagaggcagccttgcagctgctgcccagtcctgtgggctgcagccgcgtctccctgagctgcctgtcaagccagtggtacatttcattccctccccattgactcaccgtgcggaatcaggcaaatgagtaacttttcttctctctcccaaacttctgcttagacctaacaattgacgcaaagcttcacttatttctacactagatttacagatttctctgagcagatctgtagtttgaaagaattagatttgcctaacaaccagtaatttaggttctgttaatgaataactcactttaagaaatcaaggaagttttaggttaatatcagatgtggggccttttagcaggcatcaggaaaaaggcttggggagggaatgcaggaagggaagcactggaatgaaatggtatttaagccaaatatgatagaagaaaaataccacaagagaagcaaaatagctagggtaaaggagcaaaagtctaattatactattggtattgcttacgaaacacacaacaacttaatgaaacttccctggtagcactagagatttttctgaaccctcatggttccttcttgcatccactcaaatttctaactccttccttttaccatccaaatatagaactcatcttttcaaacctaattcattggggatccctcacaagcactcccacatcgcctcatctctctctctcttttaaggagaatgcactttaaaacctctaatgcataaattaattggtggtgcccagtggattattatatctagaggctcttctctccctttaagtgtatggcatgggctttcttcccttattgatctgaggttttgccttcacataaagtgataaaacatttctgagtctctcccgaccggaactttcagtcaaaccatgtgagggtaacagggagggtgggggcgggggctgcagtggggaaagtcaggtgtaagatgtacaagtggaaataaaaatatttccattcagtggcaatcatgctgcatgtaaaaaaattactagtccaattaaaaggactactcatggggtgaagattactttctcttgtgtttgacactcaacattcacttactctacttttagtcaaaactgcacccaaatttcccttgggaaaccatgtcctttgggtacagctgatgcccataaacaggatgggccttaattggtcttacccaaattagagtaattgcattcctgtgatcatagtgactaatgcagggcaggtgtgcgaccccttctaggccaatgagaggacaatgatgaaagctcagctttgggagtaaaaagtctaagctgctggacttgatgataagaaggtgtaaggtctggctgctattgccctcttgccaccaagaaaactgttgacttcatttgggccccttaaaccacctgcccctaatgctagcaagacctacccttcagtgtacactaataaattccttaatagcttaagtgattttagattgggttttctgccatttaccattaaaaaatttccacctgacagaatcagcctaacctagttttgtgggaagtctctcctgggtgcagctcattgaaaattaagtggactaagagactcaacaggaactatctatgacaaatgggctccttcagtgacaaccacaggcttcctctgacaactagcagatgcaagaaaggcctggaaaggaatgtagtcattcagtgtacctgaaaacaggaccttctaaattattttttcctaaccagctacatagtcat

SEQ ID NO: 663 - DNA, 167676 bp, Homo sapiens
  source 1..167676: mol_type = genomic DNA
ttccccagtgcaaatcccagccctcccctgttggttccaccaggtggttcacacactagtgacgccttggcaagtctgagatttggtttccttgtacagaaatggggtgacagtccctcagaaacaagggagtggttctgcaggtgggagctgccatgactgctgcggttttgaagcatctgtgtgccccccaccgggcagtgggacatctcggctgagcctctccccttctccatgcagatctgggacatgagcgatgatgagaccatctgagatggccccgctgtggggctgacttctccccggccgcctgctgaggagctctccatcgccagagcaggactgctgaccccaggcctggtgattctgggcccctcctccataccccgaggtctgggattcccccctctgctgcccaggagtggccagtgttcggcgttgctcgggattcaagataccaccagttcagagctaaataataaccttggccttggccttgctattgacctgggacttggtcctccatgcagtttttatttcttgtcacagtgactgatagccatcccccaggatcctttccccttggccctgagggggtgacccaacacagaccaaatggggaaatgagcaaccagctcctgcccagagccactgcgggaggtggcaccctcatccccggaatgtgctgcccaccgcaccgcaggctcctcctgtgggggccctgggcatgggtgagggtgggaccccgtgagcgcactgcaccctggccctggtggagcgggaggaggaggagagccgagctgggtacgagactaaagggcccacatgacccagtgacgccagatttccaccaaggactgagtgagctgctcagacatggctttctgcctcccagcctgtcctccactgtgggcatagcatctgtgcctgcctgcctgcttgagggagaggagtttctgctgctgccttgagctggggggaagagcccaggggcagatcctggcagctgcctggatggggctcctccctgcccttatgagcaggccaggcccagaaaggccgagcctgggctgccttcctgccccagccgagggaggggtcagacggctctaccatgggtaactcaggcaagagctggttttcctctttattctgggtgtgtgcagctgtgaggccccaacccaggagaggccatggcctaggtacctgtgaccaccctgcccccgtgtagagggcatcgtctttcctgctattttattctttcagcttttgtcttaggcccagaatcaaagtgaaaattgagtcgagctgacccttacaacagtaggatttagtagggtagatttcaaatgaggcttcgcttctcccaaagtagccagtccaagttccagtggctgtcgttcagctcatgggagcttcatggggacacagccggcacaggtgcagggcccgagtccgcccacccagcctggcgctgaaactgcacacgtacactatgtggtttaagagcactttattattgttcttaaggctacttttaagtacaaaaaaagatggcctgccaaacctttttttttcttcttccaggaaaaacaggccacagagaatggtatattacagatttacacacatgaagagaaggtcagagcgcactgcaggcagcgcggctctgggaagaacttcacggagccccttcttagagcagggagggggctttctcagtgaaatgtttggttttctgctgcctcctctgccccaggcccccctccagggtactgcctatcccagataggtcagtgcaccagggacccggccgccagcaccgccgacccctcccagagtgacgcccttgttcactgacaaagagacctgtcccaggagtgtcctccaccgagccggtcagctgtgggtggttttcctgttacgacgctcagtagcctgtagcaataacaaactcgtggctatgaatgcagatgcagtgttctcatagaataactgttcctgcacttttacagacaaatctacgacaaaaaaaaagatcaactttttttttccgaacaacaaaaaaaatgaatgattacaataggaaagggaaaaattaaatagctacatatcattaacaaattaatgttcttcaaaaaatacctacaaatttctctgtacattctttacgcacagcgtaacgatggtctcaaaatcacccatatagaaaagtgttctcaacgatttttcctacagaaaatataggggcctgaatgccaaagcttggaagcccagtacagtgggagtgaaatgtgtgcggggcaaggagaagggcttttctttcctccacttttcaaaggcctgcagccactctgtgactacaagagccagtcctccgaccttttcacccagtgccaatttccaaaattcaacagctaaaaactgtaaaaccgggggtcatacggtgtgcagagtccacaaagccttgcaggtgaggtgaccacgcccacgtcacctggtcaggtgccatcgtcgtgagcctctggtgggccaggtgggacacagcacaccccagggggaggggatagaaacgctcattgaccaaaaaggagcagctgtgacctccacagctgtgtctgtcatgcttgcttcatctaatttctagttagtagctattaatatagcaaataataaatgcagtaataacagtataaagtcagaggaatgtatactgccttggccccagcgtacgaggaagcgtataaaacaccatatcacagattgtctgtcagtaatctgctgttcagccaagagagttcaaagggagcagtttctgcatgtagggaagttggaagacacaaaccccacctcccctgggagcttgtaacaaagcagacagggatgcaaaaataaatgatgtcagcctgcagccaaactccagcatcccacaccgcagctgacccactgctcatcgcgagggcctgccaggagctggcctcccgcactacttgtgagtaaagtgaatatcaaataccaatcttagagtacaactgtaccagcagtaagtatatctaggactgtaactgacaaaaataaactaattctgaaaagaagatagtaagtattaaggtttttgtttactgtctatataattaatagaaaccagctattttttctccattaaaacatgcatcacgtttaaagcactatggaatcctccaacctcagctctagtctaacaaactgcagtgttcagagaagataaaatgcccgtgattggtagagtctgcagtccagttgcaagcacctgaaatctagagagagaaagacctataacctgtatgagacttccccttccaaagctgtattgtctacattaaaaaaaacaaaaacagtaacaacaacaaacacacaaatggtcagaaatgtcatccttaaaccctttgtttttcagcagtttgccctcagagttctggcataacacataaagttgtcaggcaactttagtcctcctccaatagtgcaaatcagacacgacagttctcttcaagtatacacacgcacacacatggaccgaaccaaacacgccgtggaagctgagccacacacaccccggtctcaagaagcaaaggaaaaagcacaaagcgtctgagtcaccaattcatcatggcttgtgactgagaaagcgctgtggagtcctggccccgtcggggcagcagacctgcatcagaggtttctttggtaactgaggcaggaagtaaggatgctacattagacagatgttccacgcgtagttcctgctatcatgtttgagggcccccttgtacggataccaagcaagtacaaaaacagaacacaaatcccaacaacatggtttttgcaaataaaccatcccttcccttccccccaccccacccccatgatttttttttttttaagtactgactgttcaaagctcaggcaaaccatgcagatccacgtgttgttggaggaggcgctcccttcaggagaccacagagggggagtgactgtggctgaccatgtgggcagaggggctggcgggctggcccctgcgagaggcggactcagggctgctggatgctccgtccttggccgctttgatctggagccacgtgtcacccagagctttggcaaagtggtcgtccacggagcccgtgatggacacggagttgggtgccggctcgggctccttgtaattcttgcccaggctcctgcggaaatgctcctccaccacggggtcacaggtggtggcagctgcaggcaagcaggaaggcaggcagtcagacacaggtggctgcagacagacaggcacggttgcagcaccctccctcaggcagcccagagccggactggctgccacggtcagcgtgggctctgcagacagaacccacctcccccggctaagtcaggcacttgggcaggtcacttttctgtaaaatggtgatgtaccaactgcactgggccagagtccgagttcagaaagagaatgtggcattaaatttaaataacagtagccgctgccctccctgcaactagggcatgagaccctggaactgagcgaggcggtgtgtttctcatgcccttcccacccaagtcatgcgcaacgctaggcgcacactggacgtgctcaagaaatactttttcaacctcagcaatagatgggctcaggggcgagaggtttcagccaacagcatgacagagaagggctctgctgccactagcacagctgtgacaggtgaggaggcccgggacactcaccgctcggtggcctccggtagctggcaggcccgggcgcggcacagccgctgtgcgcgatggggcagtgcgagaggttgcagttgcgggcgccagccgaggcacaggtgatcacggagggccggttctgcggggaggaggggtgtcagtatgtggagaccagcttcagtaccgggcaccacccctggggccctccccagcacccttcaggctctgtcctggtgcccttcctgacccagtctgccacctcccacttcaatactggagtcctgttgctaaacacagccaatccacagagtgagcgcagctccaagggtgtgtgtagtggcccttggtcgtggctgtttggatcagtgagggtacaaaggacaaaagctcaactgttgagttggtctgtccccatctctcaaatctgttaagacaaacaccgggcatcctgtggaggacagagggttgcaggagggacctcgattctcccgttaacgtccccagagcccttcccatcatgtccactgagccgcgggtgtgcctggagccatccaggacacttcaatacacggcaattaactggaagcattttgcttgagccaaagccagctcgagttggcctcagtgatgacctacaaatcgggacagagaggaaatggaggaaatatgcctaagtgtggaacggcacacatcccaccccagcccgatctgccctgtgcacagcctcactctctccttcacccccacccccacgctgtctgcctggcaaactccccttgttccttcaagccctgttcagatctctctctgaagcctttcactggccaccgccccaccaccaccgcttttcactcctgctcccctaacccaccaagattcagcaagtgcatcggtctgtccaggtgctcccgtaagaccatgcacaccaggcagtatgtctggccccccagctttggtgtggaacctgggacagaaaatatttgtgaactaaacagaacttcctcaggttcccccaggaaaagtatcttccaatacccccgaggacaaggtggtggagtatgtgggctaagttccaggacagccagcaaggagctggttgaaatcaccccacagggaccaatggtgacagcagtgtcagccagagggacgctgggccttatcctccccagccagccctttccattaaagttagagcagtagctggtataaagacacaaaaggcttgcatgccagaccttctcatgatagacgacagtgattgggaatggtgaaagtggattctaggatgaaaatgtggatccacaaggatgaactgggattgaacacaaggacctgtgcttgggtctaacaagaagcgacacatgccagggtagggggggatgtggcttagcaacagcagaccaaccaagaattcagggtttcttagtggcccgacacttagcagcgggacagagctgcccagggttcgtacggcctccatggtgtgcacaggtggcagcgcagagagaacccgggcaggtggagctgggctgaatgtccacgttctgcctgtggacagggcctcgggtgagagacttcacaatgctgagcagacaggctcggaaagggggttggggaccgacagatgaggcctggagcagatctcacactggctgaccacaggggtcaagcagcagcaagagagcagaataccgagacctggacacgcacagagccaggaggaaggagggccctgcccctgtccagctctcagagatggccaggcccttcctgagcctggctgcacccatgaccttgggctctaggagacccccccccagggtcctcccaataaaactcccttttgtgctcagccggcttgttctttgcagcgagcgtgtcctgacccacgcaaatgtggggaactggggagacatttcgagcacagggagggggaatcaaggaagatgaagaaatgagctcactgtccagcctttatgtcagtctatccaaggcaggaaaggccacttcagaagagactctctaacaagggaccagcagggcaggctggctgactggtatcagaccaccttcagggcatctcctgacctgagctggggcgaattgccttaaccggtcacctgcagatgtgaagatgttcagtgtctgggcatcctctcctcctccccacaacccaggctgcagggtggcccgtgagccctcgtgggactggctccaccacccctcctccccagctggagtcaggcatcttgcccctgcctctgtggttgagtgcaggctgggactcgtccacctagaacgggccccaggcctccagatggtgagcgtttatgggatcccgaggctcccctcccccacacccttattttccagatggggaaaatgaaggccagaaacaccctgttggaagttacgctgcggatttgtggcagggccagtatgagccctgtcactaaccccttcacccgctgtcccacccacctgtgactgtcctcagacagaggctgccccgggggagagggctcccaccacctctcctatctgaaagcaacccccaaggctggctgcgccaaactttttttttttttttttttttttttaaagacaaagtctcactctgtcgtccaggctggagtgcagtgacgcgatcttggctcattgcaagctccgccttccgggttcaagcgattctcctgtcagcctcccgagtagctgggattacaggcacccaccaccacgcctggctaatttttgtacttttagtaaaaacagggtttcaccatgttggccaggctggtctcgaaatcctggcctcaagtgatccgccgcctcaaccccccaaagggctgggattacaggtgtgagccactgtgcccagccctcaatgtgcgaagcttaaccccatcttgcctctcctcactggctgctgcccaaggccaccctcttggtgtttgtctgtcctgagctgctatcacaaacatgaaatggggggacactttctgtagcctccccatacatgcccctctgggaactttcctgtcccagttcccagagatctgagacacattttctgccacacagaggaaggcttccaccgtgcccaccccacagggctgcagcatgcgtcctgcctgcctgtggacacagagctttgctgtcaccccaggaagccccctccccactgccatttccctggctctgagctgcaggatgacacccaacagacttccaggaagagacctcggagctgctggagcacaggcaacgtggctgcttggtgtcctcagcagggcgcccgagcccagctcggattggtgtgcatggcctcagccccgccacgctgccgcaggaaggagccccacgaatggttacgacatgaatgacatgtgctgacagcagccacggcaaggagggcaggactgaccaaccccagccgaaaatgacagctccggtcagggccactgtgcccttcccaggaaaatgggcagcttggggtaccccgtggcccctggctttgtcctcagtccaggccaggatcccataaagatatagctggggggtcgaggttcttcctcctaggaaagctgctcaggagccccaaggcacaaggaggggcccttgccacgtgtgccgtgggcagccaggcccattccaggctggggagagggagacagggtaaagagagtcaggccactctgttcagcagttcagtttttgcaaagcaactgtgaccgaaaaccaactgcaagattctcaagagccctgaagagtcaaggaaataaatcatccaagaacacactaagcccgccaagggcccaccctgaccatgtgggcagagatagcttgtaaggctcacagttatgtcccccaggtcatcaagggccagaggctggatgtgggtgctccgagattacagctgaatcctcccctccatacccgtgtccttcagggactccccaacagcagtggcaatggccagagagccaggttctgcctgcacggttcaggccatggctcatggcagcattacaatgcctgttgagcttcccaaagcagaaaggtccactgcccaccccggggagcagtgagcgggtccctgtgggtcgcactgcgcacacgcctctgttccagcccctgctgctgcccaacagcacaatcctctcttctcatgtccatttccccaattagactgggagctccctgtggccgtgacagtgtccacacacacgtctctggctgcccacagctctgctctgcagagggctgggtaaatggtgagcgctcgtaaaacgttgaaatgaacagcagtgataacttggcctcgggttccatcagacacatcagcgatctctcctccagactaaaactgagcgtgctgagaacaaaaactgcatcttgcttgactggcttctggtaccccctggcacacagcaggggtctgtgccattttgttaaatggatgaatcaaacaaacaggattaccatgtcaggctctgaggcaagatgggcaactgttctcagcttcaccaggattcccaagcaccagaaccacctctcccaactcccagggcctaccccacccacagtttcaacagaccccatcagacacggacaccaggcagtgccacttggagggaagccccggtgaggccacagggacacagaggctcttgcagctgaatgcacagagcccggaggcaccccctcggggcacggcaccatcctctctgtcagtcttagcaaatgctgactactgactaaggacctattaggtcgcagtccctggagattcggagagctcaagcagtaattttgagcctcctcaatgctgctgccttctcccatatatttccccaggaaccccatttttaaaaagatttgtttctaccaagcaagctgtgtttattaagcaatcatttaatttcctattttcctttcatagaaaaaaatccctatgtaccaatcataggcttctgaccagcatgggctcacaaccctgtgaccatcaactgtgcaggaccccagcccaaggcaaagcaacctgacatttcccttcatccgcgtgaccgtctaaaggagaaacgtaggacccccccacccgaggatgactacattcatcctaagagaatcaggcctgccacagaagactgctggaggaaacacctcagtacaccacccctgtactgggagaggaaagagatgaagccccagtgacattcaccttgcccaaggccgtgagtgctaagaggcaaggcccgggcaggtctgggcaggaagtaaaagcagaagaggactcctgttctgctgtcccttgtcccaagtgcacaacagaggcgaagggtggcatccctcaccacctccctccctcaccacctccctccctcaccaccgccctcggagtcctctgctcggggctctccatccagcccagtcccccagcccctggactccccacgccaccctcccagacagaggcccacctgctgccgctcccccggggtcagtgtgggcgagaggccggctggcctgctggcgtccaggctgttcttggtcagtgcgaggggctgctccaggccaaggctggggagggaggtgtacaggtggctgccgtgcaggctcatggtgggggccacagcgcgctcgatggggctgcggctccgctcccgggggtctctgcggcagtctccattggcagtcttgttcctgaaaaagaggaatgggcattcagggggcgttttctcaaaggcaaaggggacagtgactgtgcgccaggcactccgtgttgcttatttaattttttaccctgaagctcaggtcgtgtggctgggcagcacgatgaggagccggttgccagcccgggtcagccggacaccaaagcctctgggtgccggagaagctgctgccagcggagtccaaagtcagctccatagaagatggagcccccgactcagtggcgtcctctgcctgactctgtgttcacttctataataatctccactccctgggagcctggggagctggaggccaagctggttcgataaggacctgccatttggacaggacggggacgctgacaacgatccagagtcactggctgcgtcctacatgcagggccctattcaaagcctccacagcactgctcagcccatcttcctcacagtactgctcagcccgtcttcctaacagcactaagcaggcaatgctgccaccatcccctttccagaccagaaccccaagactcaagagtggtggaataatcagctcagactcccagctgacatgtggtggcacgtgctctggggttcccggggtgctgtagggagccggcgcgcagctctctcgtccaggacacacgagcaggagtgacctgcgtccagaaggtccatcactagccctggccatgtgctgagcacccaggcgatgccacgtggaatccaggtgagacagtcagcaccacctccatctgatgtgttagtctgaaggcagcgttacgtgttgcatctattagacaccaaccccacacaggtaagccatggccagccctggtccaccctccctgctttattccaggggtcccacagttccatctgccttgggtcttgccccttcaatccaccatattatccgctgacagagtaacctttttccgtaactcatgagctggtcatttaaagaaaaaggtggtgaattatgatttgagtgaattttaagaaatacaaattattttcagagtctacaagtagtcacctgtcttaactagcagaaaagcctaggcctgccctggtgaagcagcagccacagcccccgtcccggactggctgaatatgttacacacacaatgaatgttacacacacaatgttacgcatgcacacagaatgttacacacacactgaatgttacacacacgcacaccacacacacacacgcatgtgataggcgtacctttctaaaactgtagattaacttcagttgtaagaaacaacacacggccatcccatgcaccctttaccttgactcccgcgatggtgacatcttgtaaaactacagtacaatatcacaaccaggatatcgacaatgagacaactaccaaccttattcagatttcgtgttttgcttgtatccattccagagcaatctctttataaggcaaatccaaccacatccagcccttagtgaatgtttttagcagctcagcacgggccttggtagcctctgggcctgaccaccttcccgtcctcatctctggcttcacgcctccaaatgttgtgttccgtagttccaaccatctacttgccattcctcaaataagatgcggccactctctgcctctgtggctgtgtacacgcggtgccgctctagcctccctcctccccgtcctgcgctgccaaccacagctgcagtgtagaatcccaaggcgccccgtgcaaacctttaatacagaatccatcccccaccgtcaatgatctcttcgtctacgcacccgcccctcctcacacacggcagcctctgagggcgtcgagtccctcctgtctcattacgcttgctaccaggggtgcacagagacttaacgggtgaatgaagagaagcagcatatgggtgaccgtgtaagaaaggcaggtatcgtggagtggaactgtgggtgggcagaatcatggagagctggagggctgaggagtcaactggaggcgcattcaagcctttagatggaccctgcggcccagtcggtgagctgctaagggctgagcaggagaagcaccagagggggcctgagtgcagcctcggctgtgatgttgtgatgtcattctgcgccatctccagcaggggcacgcgctcagcttagtgacccgaggcgttccgagcctcggcgtccccatgtaaccatgtggtcacagtaagatccacccagaggactctaaatgggggacaaacagcacacaaacaaaaacaatcagagcggcgcagtgcagccctcagtgagcgccaagagaaccctgtcagccctaaaccgagtatattgattatagggtgattagctgtacaggacccagtattcgtttatggggtttttttcttcccctttattttctggctgatgatacagaatatcttaaaagcaattaaggattaaatgttcagcccattaagacaatcatggaagagaatgttctggcagagtctagatagtaggttccatccacgccacacacatcctggcgattttcaaaacgttaaaatactaaaaaccttaatactgaaaccagcctgtccataatgtcatctgtctgtggcgattcagaagacagcacaggtttctgcaatgaatgcctcaagggttatgatcccagacaccgatgtcaccagaagaccttccgcggaacggacgtcaggccaagcagtcctgagatctgctggcttctacctaaacgggacttggttcctgaatactcagttcatcagtgtcaccacacatcctcatcttcagtgtcccgctcccttctaaattcagataaagatacaattttattgttaacaacatgagtgaatggcttctctccaccccaggtgatgcttccacgggccacttcatgaagtgcatagacctgggggctcatgtcccagattcaggagagcctcagacacagtctgcctccgaatttagacgtctgtttactcaaccagcgctagttaagtccctgttctgtggaggttccagaactgcagggttacagccctgccttctcatgggcttacaatctagcagggacagaaaggcccgggaggggctgcagctcccaagtgacagctctggatccgggcaaggataaagacacccccgggtggcatggaggagcagactaaaggtcaggcgtctgcccatgtccaaagccaaagtcgtggtacataaggcactgcccacccctcgcaccttatgtcctaggggcacggcacagtcacgcagatgactcagctgcgccttaggaaatccaagcatgactatgagaccacatcacagaggaaaggggtgccagggccgccagctgccagggcagaggtaaggacggggcagccctgcacctaaatctgccatctatgctcccacagccccactgtgcgcccaccctacgcagggcagcagggagaaggggacttccaggcccactaactggaaagacagtccgtggaacacagcacagtgggcactatgggtcagacaaagacactgaaaacagcgagaaaaggcctggagaactggctggttaattttagtaaaattatacattactcacatttccagctcattttcctggttcccggagcttcaagacagacattgttttccaggccccgctcgcccggatgaatcacctcccggccactgcttcccaggcgtcatgtgctcccggggacggcagaaaaccgcacgcatcctgcccgggagatggaagtcgcctccgctcctggtcaggactgtgcccgagagagcccacggcatccccgcgaacacccaaaggactctgagtggctccgtgccaggcctatcagagccgctgaggctgcacggcacccggccccgccccgggcctcatccccatcctaggcgggcacttccactgccagctgcccacggagagaaagatggaaagaggagggagggaaagagaggcctacaacaccatcatccaggacagagctttctgagtactgaaagccacacgctctctaagctaagaaaccaagaatgtccataacatctggggaaaagtaaaccagattccaagcagtgacattgaaagaatccatcacgtgaaagaagtgcactgcgtctatttgatactcattaaaatgagtttcccaccctccaacaaacgtgctttgggatgcttagcccttagccccatcacctgacgttctgagcctgcgctgggcttcattcaccgtggactgccacaagctacactgatctgagtctgagttcctctgcctggggagggggtatgggtacaagacattttgaggatacattctggggtccccaaaggcccctgagcaccatggcatggcaggtgctcccacccagtgaaagagatgaggcccagggcagccttgggccctggcctcccaaaaaccaacatcctgaggcggcaaagcagcccgtccccatgccaggcgttgcctggcaggagtagaatgaaggctatgcagagacatcccccaagcaccagagtccaggtggagacaagagattcaaaggaggaggggccggcacagggccagtgagtgggccgggacacagccccatctccagccctttcgtcctctctctcccaccgcagcagttacaggagaatccgacatctgagaactggcaggacagccagtcgttcacacagtcttaacacatcataatgagactgctggctgggcatggtgacgtgcacctgtggtcccagctacttggaggctgaagtgggaggatcacctgggcccaggaggtggaggctacagtgagccatggtcacgccactgcactttagcctgggtgacagagcaagaccctgtctttaaataaataagattgctagcacatctttaatcttaaaaagcttcctcagaaaacagacttaatgccactgaagggtgccctgaaacctggttaaagtggtcagctgtatgctctgctaatttactacagctttttaaataataaaattttacctgaataatatagacagaacttcctcccaacctttacctgctgccccctggggtttctgatgtgcacagggcaggtcagcaccatcccagttttacagaagagatgaccaaggtggagaagatgaaggctttgcctagacatgctgcccaccacagacaccggccctgtggcatcagccgctcagggtcgtcacaccaggcccaccaagagactctccatcacctcgcagctccatcccaagctgccaggaggcctttccgacccaccagcaccatttccacccaccttcctgccccaactgcagagacacaggaaaggagcagtgcggagatgccggccaccaaggtctgtccccggacagtcctgccacgctggctttctcagtcagtaagcttctgaagcacagctcccaggggaccccggtccctggctggaccgtgcactcccgggaaggctgacactgcagcccccacgccctaatctccttggctccgcacgggtgaccacataccagatgttctaataactgtccatagagtaaataaatcattaaggtacacatagtatgtgtgagtccagttaacagcgtttgtggcaaatgacaagggagttaaggagatttcagagaaaatgactggtggcaaagacttttttctgaaaaagcaaaatttaaggaacatttaaatgttgggcataaacagtggtgagatgtcttctcccttttagtcccttcctccaacttctgttgtcctcctcacctcctccctgcttctaaatgtccccgagctcatccaaagcaccccacaacacacacacaggagtgaactcatcaccgtggcttctctccccttgtgagtgggagaattcactgcttcccagtgagcaacaaggtgcctgggtgtgtccccaagacatcctggtcaagctgcgtcactcctctgtgccaattttagacgggaagtgagggaagtggttgcaaaggaaggcctgggtgaagacgatgtttgccgaggtggcggaggctgaggcagagacaccctcctaagtacaaatggcaagaagtgtgtcgtgggcaggaaaaagctggcaaaataccggcattcggactgtcccaaagacagagatgaccctgaggctcctggcttcaatagcggggtccatcctcgctggcagggacacagggcagagactgtctctgccttctatgcgtcagcaactactgccatagcttaacattgcttaataattgaaaaaaagccaccaaaaagtcaagggaatgaaacccgagtgcgaatgccgccacagccagcatcactgccacaaccatccacccacgtaatgtttcccccattaactctccataaaggggccaggtgcagtgactcacgcctgtaatcccagcactttgggaggccaacgtaggtggactgcttaggcccaggagttcgagaccagcctgggcaacatggcaaaaccccgtctctacaaaaaatacaaaaattagctgggcatggtagcgcctgtaatcccagctactcaggaggatggctggagcccagtaagttaaggctacagtgagccatgacagagccactgcactccagcctgggcaacagggtaagaccctgtctcaggaaataaaaataaaatactccccacaaaggtagtgtccctctttttgctggttcagatttcagaaatcaactccatggacccggcaacacaggactcatttgctccatctattgcgagacagctgtggcttgcggtcccagcgtgagaagcctattggccgggcacagtggctcacacctgtaatctcatcactttgggaggccgaggccggcagatggctttagcctaggaattcaagaccagcctgggaaacatggcaaaaccctgtctctactaaaaatacaaaaattatctgggcgtggtgtcacgtacctgcagccccagctactctggaggctgaggtgggaggatcacctgagcccaggagatggaggttgcagtgagctgagatctgcaccactgtattccagcctgagtgacagagtgagaccctgtctcaaaaaaaaagttggggaatctctgagtaagtgattgacgttgagtatctttattatcatcagctctcatttattgaaggacatgcccaatcatatgctagacctcatcttagtaaattcactgccccactgcaaaataagcatcatctccattttacaaataagtaaactgagcttgagagaggctaagtaacttttctaagtttacaaaactagtacaacgattccaatatatattggactggctccaaagcctttccattttccgggagggaggaaaatacaaagactcgtgtacctaccactcagaactagcaaatgaaaatgtgctctcatatttgcttcgggccttttctttcctctggccatgatgaaagcagcagaacatgcagacgcatgaggtccctgctccaggccctcctcagtcccattcccctctcttcgtcccctggggcatcctctgttttgtatttggtgcctcctgctacctgactgtcgtcctcttgccacacgtggatgtgtccggaagcacacatccgtcgcatgcttcacactccagcatgccagcacactgtatgtcttgttgtacaaccgtgtctttccctcatgttggtcttggagctctacccatgttccaacacagagacctggcttatccatgttatttgcctgctctgtggtattcttccatacgaatacaccactgcatatgtacccgttcctttatggaccggcgcctgggcactctttggtttttccttctgaaaatgacccccgtaggccaggcgcagtggctcacacctgtaattccagcactttgggaggccgagacaggtggatcacctgaggtcaggagtttgagaccggcctgaccaacatggcgaatccccctctactaaaaatacaaaaattagctgggcttggtggtgggcgcctgtaatcccagctactccagaggctgagggaggagaatcggctgaacccgggaggcggaggttgcagtgagccaagatcgagccattgcactccaacctgggtgacagggcaagactccgtctcaagaaagaaagacagacagacagacagaaagaaagaaaagaagagagagagagaaagacagacagaaagaaaagaaatagagaaagaaagaaagaaagaaagaaagaaagaaagaaagaaagaaagaaagaaagaaagaaaggaaggaaggaagaaagaaagaaagaaagaaagaaagaaagaaagaaagaaagaaagaaagaaagaaagaaagaaagaaagaaagaaagaaaatggccccatagtgcttaagtcctcagacatgtgtcctggtgctggggacagggcttctgacattctctcaggtcagtatttgcaggtcatccaccttcgacttcaacacatgtgaccagaaaccttcccaaggcagccatccactttgctgtccctccgacggccatggctgaccactgctgctgctgtgtatcctcggtgacatctggccttggcagcctatggatttctgccattctcctggcatgaaatcactccttcttgttgttttaatttgcatttcttcagttaccagcgcagttgagcatcttttcatacacttactgaccattctactttatgctgtgaactgcctttaatttctgtaatgggttgaactgtgtccccctgaaaagacattgaagtcctaaccccctaggttctctgaatgtgagcttatctgaaatagggtctttaccgaagaccaagtaagctgtggttatgagggcgtgctctaatccaatgtgactggtgtcctattagaaaacactggaaatctggatacagtgacagacacatacggagggaagaagatgtgaagacagagagaagaccgtcatcaacaagccatggaatgccagaggccaccagcagctgagagaaaggcctgcacagacgctccccacagccctcagaagcagccagccctgctgacaccttgatctcaggcaccaggaacggtgagacaatacgtttttcttaccctaagccaccccatctgtggccctgtgttatggcagccctaggaaacgaacacaattccctaggccgtacccacccgctgccttgctttacacggctttagatatttgccacacccatgtttcttctgctttatctatgatcaacctaaaagtttttaaagcttcctctggacatttaaagagaggtcctgagatccactgggcctcggtcacctgtcctgtatgcctgtcatcctgaggcactgcacgagcaccgcacaatgacagtccaaacagagaccagagctgggcaggccaagtcagcccagacctgccagtaagaagctgagagttccagaggctgggaagggtagggagaaggtaggggctggagagatttgctaaaggatacaaaattacagccaggtaggaagagtaagttccagcactatggtcacctagaccactgtagggtgactgcagttaacaataatacactacacagtttcaaacaacatccatatattggatgttcccagcacaaagaaacgattaatgtttgatggaggctaaccaccctgagctcatcactctacatgacacatgtcgaaacttcactatgtaccccatgaatatgtacaattactgtcaattcaactatatatgtgtgtgtgtgtgtgtgtgtgtgtgtgtgtgtgtgtgtgtgtgtgtgtgtgtattttaaaagctggagggctagctgcccccaaatatggttcaggaagccaggaaaaagagccccatcttatgcgcctacatacaaaagggaagaagcttgtcggccgagttaccatccaaaacccttttggcttggtagtgtttggggaggatgaaagaataaagccgcagatcttttcattactcctgcatctcctcctctctcttcttcaacgctcgtgccaaccccccattcccactttacaccgaggaaaagtggattgagaggtggagggatctgcctggggccatgtggctggcaggtggcagagtagggacttgggtccttgctcccctgctgccaatgcccggagggtttcaaaagcagctcaggtctgtggtgcgagagggaaggcggccgcactgagtgctgtcagagcaaacgggcgtccattctgctgctctcctgtcagtgtggactctgtctctctaactgcgccaagggtttccagtcactgtgctctcaagagtgacagtcattaaatcagcatagccagcatctccacatgctccagccttcgagtttcttttgactccctccagcagctcagctggaatgtgcatcgtgtgtgagtctgcccctctctctccttgagactggaaggagctccgagggcaaagtgggtccctcctttccttgggcacaatcggtcctcagatctgtgcaagggacggaagacacttgggaaacctggcggatccggaaccacagtgtgcacttacccagcggcagccgcttaaagaaagatcccagacaccagccttaggagagaaactctaagtgattttagttagagacctgtcggaaacgctgctgctggaagtctccatctttccattctccctatggtggcccaaaaagccaggtggctggtttggctagaatgaggcgtaaagtcagagcaaacaggttctgagtgagtctggggccaacccctgcaactttcccatatccaattccagcattcagagaccctctttgcttggcaatgtgtgcaggctttccagacccgttgcctctagagaggcgggactcacggaaatgctggccagcagcgcggagcccgtccaggttgcccagatcctcaggtcacgtttctgaatagctcaactctatgtaaataaggtaccagttttctttaaccagaactgtctacatgtgttttccattattagctttagttttttaagaaaaactgatgtttgagaaacaggtcatggctgagaacatgaccggtaaagcatctcacctgcccccacgttagcaactgttgccagggaagtagttgtgagagcacagccagcagtggatgcccacctgcggccatgacccccagaacttaattcagatggggcaggaatccatgtgcatgctaagcactgtttacaggcaaaacagatgtgtcccacattagagttttcaaatgaatggagatgttgctgagattaataaaattgaaaagaatttaaaattcctactgctaatttgtagttgtttttgtcattatgtaatctctcaaggaatatgttaaaaatacaaccactatcatatttttgacattaaatagagtccttgtatcacagaagggatgaaaaacactctatctttccttcctcactgagctgcagtgtctgaggtggacaaaaccctgggagacacggcgatctctgcacagcagcagaggcatcagcatgtcggcatcctgccttgccatcctccggggactacttgagacagctgaggcgaggactagagggaggggtgaagaaaaggcatttgaccactaagaccatccagtgctagtcaacccagacgtcctgttctccctgctgcttcactccaccccacaccctcaatctgactctgagctccgctggaaaggcctttcctgtgctggaaaagtggagggcaggacccactgcctccgatgcccgcctcaggaaggcagagggtggagagagagcccatccaccaactcaagactaggagagaagacacattccctctagacacccctggagggaaacgggaacagtgtctgctcggtaggctgctcagaagtgtctgcaagtcactgtctagaacagggcctggcacacaactattttatgaatgagccaaccgaaaactaaacaaattctcaggagaaaccagcagcaacaggttagagtcagacagaggagctcatgaagctgggtgacccagggctgggccatccatggccctggggctcctggggaaacccaaggagaacagccctggccagcgccaaccccctagaaacgagtggtctgaggagaccttctgccattccctctctcgttcttgcgactggcactgtcatctttcaaaatttcaaattcttttgaaggctcactcttagtttttactccatattatgcagcaaattgctggaaaatattataaaactgtttagtggccaggtgtggtggctcacgcctgtaatctcaactttgggaggctgaggcgggcagatcacttgaggccaggagttcaagaccagcctggcatggtgaaaccccgtctttacaaaaaatacaaaaattagccaagtgtggtggtgcatgcctgtagtcccagctactcgggaggctgaggcaagagaatcgctggaacgtgggaggcagaggctgcagtgagccgagatcatgccactgcactccagtctgaacaacagagcaagaccccaccccccaaaaaaactgtacactggaaagattggatgctttgtccaactcaggagaacacttcacactaaaatggttttaacaggagagagatgtggaatcccagcctccctcaaggagcaccacacagctgctgcttaaacactatccagacagctgcctacctccttcctaaaggttctccctcctaatgaatgaactctgccttcaaatacaattctttggtcccaggtctgccctttggaaaaattcaatgaatcttatttcctcgtccaactactgaaaaggacttctatgtcaaccttgccatgcccagaattctccttcaaattactctgacacaagactccttatccaacctgtcacccacagggcacatgccacaagtgaacattcatatttaagagggtcacactccagaagcagcctaaggaaatagggcacacaggcaaggactcactcccttccatttatcgtagcacgtttctgaacgaaacaccagcgtagacagtctaataaaaactaacctaaagcatcaggattattccaagacctgcagtcaccagtactatcctttcatcaaaacaacccaagatgccagtaggcacttccacacccatgttgcacagtgtggtcacataaaagtctccaatccttttcttcccattatttcagctttgtgaccccatactggctaaagaccagacatgaatgagtgcgtgcaggcatatgagagacaaataatcagacttcctttctgcgtcacgtggtgtgtggcagtctcctcctccccacacaccggagcatggtcacaactgcctgaatgccagccgccttcccatggtccagccctaaggttggtaggaaccagttcgaaattattttgtggacttctccgtactacaggaagacctctggttcaataaatttattcagcactaaataaaaatatcaaacctgattttcctcttaaagttaccgatctaccctgactgaactcagaaactctgcaaaaaaaaaaaaagtaataataataaataaataaaccccaaaactattgagctaaattattatacacccattgaaaatttgagtattgagtatacgaagtgattaaatgctcatctagtaagagattttgaggcatctactgtatattttctttttttttttttttttttgagatggagtctcgctctgtcacccaggctggagtgcagtggcgtgatctctgctcatcgcaagctccacctcccaggttcacgccattctcctgcctcagcctcccaagtagctgggactacaagcgcccgccaccacgcccggctaatttttgtatttttagtagagacggggtttcatcgtgttagccaggatggtctcaatttcctgacctcatgatccgcccgcctcagcctcccaaagtgctgggattacaggcgtgagccactgcacctggcctctactgtatattctttaaagtactaatagaccgtaaggaccttcctcctgagagccaatcatgtagtgtgttaattctcaacatgaactgcctctgagcatccaggtagtcagggctacgctccatctttccaaaactagggggaaagggttggccaagctaactttctaaaaaaaaaaaaaaaaaccagactgctttacagaaacaagatttacattacttaaagaaaaaattattttgaggacctccaggtacttagcaaggctactgctttactgacaatggacaccctaatgacaaataaagcagagttcccacgggaaaaaaacagtactgagagcctatttcattgatctgagttataaaactgcatttcttttaaaatagtctcattttcaaattctgcaaaaacttcagaactaagctatctctggagcttcactgtaacatcactcacatctagatgcaaccccctggctataaaatcatatttcacccagaagtgttcgtctgtggagtgtgcagtgtggaagactgaaaagaacgtggggggagttcaatcattccattcaacactgaagtggcatctcttcccccaaactcgtgagttgatgattcaaataatgcctccagagaattcagaagcaccctcccccccaagtttcatgcaccccaagtttcatgcacctttcctttgtacgagggcttccaaaccagatggtaatggtgactcttcactactctttgaattaaattaaaattaccacccccggtggtcatcacgcatcacatctgtcgattattaggcaccaaatactgtattcctggagctcggtctgccctccaagctgcctgactctccttcacagcctcagtcaccccagatgagtatggaatataaaggattcacacacaatggactcattaatgtttattcagttgacctgaagttggtcatcacagtttttcatattttttttactatggtaaagtactacatacataaaattcaccacttttcagtgacaataagtacactggtatgttgtgccgccaaccgcaccatccgtctccagaactttttcctcttcccaaactctgcactcattaaacaccaacctcccatttcctccttcttgcagccgctggaactaccattctaccttctaggactttcactactctaggaacctcatgtcagtggaatcatacaacatttgtctttccatgactggcttacacaaggtgcatctgtgtggtagcatgggtccgaatctccttcctttttaaggctgagtaatattccattgtgtgtacagaccacatttggtttttccattcatccggtgatgagcacttgggttgtttccaacttttggctattgtgaataatgctgctatgaacatgggtgtgcaagtatccgttcaagtctctgctttcagttatttcgtgtgtatacctataagcagaattgctgcatcatatgataattctgtttaatgttcaacacatcattggtagtaaaggaggtgggaagtataggatgcatttttcatttaacgtttggccctctctactagagaaaaattaaaggtttccaaaaggatggatcttgtccacaacaataactgaaattgtaagcctttgtgaaaacagcccaagtggttcatgagagaaatgaatgttcatcaataatgtaaacactggacataaaagttaaatcaacaaagaatattcaccacccagctcactaaatccagcaaacttgggcacacaaggggcccactggagtcaatgatgttgtaatcaacagtgagcatttcggagacttataagctacatatttgtggttctcatttctcactgtgaacctttaaaaattgtttcaagtcatcggaggatggctaatgttaacagcaatacatattgaccatttgtataacattggtgtacagtgttacaaagtgctttgcatatacattatgttaacagatcctcttcaatctgcaactcctttttttttttttttaaaaaaaaagataactctttctctgtcgccctggctggcatgcagtggcacgatctcagctcactgcaacctctgcctcctgggttcaagtgattctcctgcctcagcctcccaagtagttaggattacaggcatgcaccaccacgcctagctaatttttatatttttagtagagacggggtttcaccatgttgatcaggctggcctcaaactcctgacctcaggtgatctgcctgcctcggcctcctgaagttctgagattacagacgtgagccaccgtgcccagccatgcaacttctctttaatggccagaaagtgcatttctcgaatgatgaaactaaaacccggagggtcctcatctgtgcaggcaggtgagcatacctagacacccggccctcaagcagtcacttactccactctccattttcaacccagcttcattcggaacaaggaggggacaaaagggtgggaggagaggctgctctgtggaatgaccgtacaagttactgagagatgaaacaaaagcattcattttctattaaatgtgaaagatctctcaatctctaattggtcctgcactctaaggcaacttagcagggactcaagtacaatttccatggagagaagtggtcaaatagctgaggtcaaaccctccagactccaactgcagccaagtgcttttatttcccttgtaattttctttaagaataaatgttaaacctaaaacatacccccttttggaggcgatcttggcagctggactgagtgggaagaaaaagcaccttgtactccccgaatcagcagccaaactatgcaccattgtctagaggcggtcacatgacagccatcacctgaaacttggttacttccaatccatgaaggaaacaatcactagtgtgccttaacccttccagctactgcaggcagccatgctgcagctgctctcagcagccctctctcccattccagtccccgcttaggagaaactgtgcatggcacaaatctgattgggacaaggtggcgtttggggagaagggagggacgagaaggaaaatcactgctgtcccttctaagcaaagactactctacctctcccagcacttgctgtctcgcagtttaaattaattacagctgaaaatacagggttgccatctggtttgaaaaagcaaggataagggaataaaatgaaagggttcttggtactaacctcactttaatcattgccaaagagcatgaagacagcccagcgtcctcccacaagaaagccttgggcctcacaaacttggcaagcagtctcaggcacaaaactggatgggcgggcgcttgtcagaataaaagtcctccctgaaaggagggttgcgaggtaaggggcctgcttgccccctgcactgcaataaaagtttcctatgggtcctggggtaggtcaggaactcctgggagggtttatttatagagggtgccttgccaaaacgctacacgcatcattacagttccatttggtgagaaaatagatttgctgtcagaattacagcacgcgatttcctctttctttgtttctccatcttccataacataaggcttttataaaacttcaaaataaggctaaagaaaacacaggagaggaaggttgctgcagaagtggagacgctccgaaggcacgatgcatgcaactccacagcagggctgcagccggcccctcagagaaggaatgccagaaatcccctattctctgctgcagccgcaactacagtctcactcctgcactgtaggaagcaacttccttctgcctcccttccaccagcagaaccctaggtgagaggcttttctcttaggactcaggctgccacagatggtgactccaggcactggagaagcaaaggtgccacagccatcctaggtttgtcttggtgaacttacaggtgggtgcaagaagttgctaagtctgcagatgtcttagccatacgccagcatcaagtagcccggagaagtgaagcagaagattttcagcccaatttaaatttccacctgcccactacctgagttcttttacacccaggtcagttttgcaaacaagaccctgatatacccaagcccagctgctttcagaaagtaacaccaattgaagcaccacggtatttatcagagtaaactctgatcaaccagatatagtattttataaaccagaggttctaattataaaagacaagataaaagcagattatgaaaatagcatttctgttctggtgaaaaacacatcttcaaccccaaaatgatgtgaaaattgtcttccaaatcctgccctgacagaatcactgtctatagcaacagtgtccataacattccaaatctcaggagtgtaactttctagtaaatggtacatctgtcaagccacaggaaacatctggtaaaatggttaaataaaagcagaatttaaacttttctgatttcagagcttactaatggtactcaacaagagactatcaaatactctaaaagctcaatgtgacagtgaaaaatatcctggaggggaccaggtgagaaaaagaggacaaaaaaagaagacaacccgggaaggagtgggctgcaatcccactctcgtcacgatgacgatgctcccattccaggcctgcctctgggagacagtggccatagccccctcagctccgccaaggatgggcacattcctgcccatcaccatggcagaaaccttctctggcctagttaagttcctctctacccagggctgactcccccaagcatactcatatctccccaacgcacccaacccaggaggccctcaggagaggtttggggggatggactgacgaagtgatgacacacaaacaataagcttccctccgctccacggcagacatgtgtattaaacacatacaatcattctaccatcaagacacacccaggccaggtgttacacaatacatttcagtcccttccagaacattttacgaggcttttccattaaataaaagatttaatgatttggccacatccaaattttaaaaatctatatttcaaaaatacagtaaataatgctgaaaagcaaataacattacttattttccccaacgcatttgacagagcatccttaatatgaagagtcgtaacatatcaagagaaagaagatgaatactctaatttacaaaaaagacaaggtataaacaacatcatggtcacagaagaagaaatgcaaacggccaataaggatatgaaaacatcattcaagttctctagtagcagaaaacaaacaaacaaacaaaaaaacacacaataacaatgtttctccccgagaaacttgcaaatattatataaatgaataaatggtagcagtcacctgtgggaagatgccgagagagagacagatgcatacagctgctggtgggaacagatcagtaaaccatatagagtgaagctggcagaacacaccagcgaaaacagacatggaagacctctgacccagaaattccacttctataaaagtgggaatatatgagatgggaggaaggatggagatattcgaagttctgcaaatgacagtaaaacaatgtaaacaacccaaatatctgtatttgttaaaaagttcttttggttacaagcaacataaaacaaacctagtttaaggaaaaaggggcaacttactggaaagatactgtgatatttcttggaaatgaaaaaatgctgaccaaccaatccttgaaaagagaaaaaaaaaaaaaatgaggtggccccagggatctgggcttcaggaggcggaaggcgcccatggtgggtccatgtgcagcatctcaccagagcctgccttctgccctctcccagcacccagggatccaccaccaccaccaccaccaccaccggctccaagtgtcacaacttggtgaccttcctaggtcctatgtacatatcatcctccaatcactgctccattaaggagttattaacatcaagtcaaaatcccaagaacactttttattatacatcaaatatgctgctaaaaactagaacatgccccaacacacacttaaatgctaccagttttcacagtcaagagacttcactgggctggacacagtggctcatgcctgttatcctagcactttgggaggccgaggcgggcagatcacttgaggtcaggagttcgacaccaccctggccaacatggtgaaacccagtctctattaaaaatacaaaaattagcctcatgtggtggcgcatgcctgtagtcccagctacttaggaggctgaggcagaactgcttgaacctaggaggcagaggttgcagtgcaccgagattgcgccactgcactccagcctgggtggcagattgagattccatcttaaaaaaaaaaaaaagagagagagagagggagagagacttcaatggagccttgaatgaattatttataagtaaaaaattgagggatctcccaagagagaaatctattatggtcttgtttcagatttgtaggtttaaggagaaaaagggacaggggaatgttccacctctgccatgaataagatactggattttttaaaaaagtaaaactgctggaattgttggctagacagagatgagcctttggggcaggaaatcaaatattatgaaaaggtgatttatcttagagcaggcatgaggtgtttaatttattccatgtatctcgccatcttgcattccaaatcttctgcctcctccaacagctctcttgcttcccttgtcctctttctgaatgcacacttcccaccacagaggaaccacacatatcctaaatccctcctttatcatatacaacgtcacccctcccagtgctgatggacaggcgaccccctgccgttggtccctgggtgtttcaaagagaggccctgaggagctgacactccagagcagtctctgggtcccctcttcccatgaaagcccccaacccttccccctgcaaagtgggacaactcctagattaaagattgctagaaaatacaatgactaagtgtagtgtgattcattactgaatcttgaattaaaaagaatgtaaaagaattttttaaaaaatcttaaagtataaagggcattactgaatatgaaaagatgatgtgagatcatatcattgtctgcacacatatgaaagaaagataaagcaaatacgggcaaatgttaacaaccgatgaatgcagggaagggtatgtgagtgttcactgtgctagtccttcagcatttctgtaggtctgaactttctccaaaataaaaagtatctatggtgaggaaacggtgcaggaaggatagaaagaggagattatcaccaaatttggctggaatatgtagaatgatgtgatttaaagcacaggtaatatggtatacactgccctccatatcctcaagttctgcatccacagattcaaccgatcatggatggaaaatggagtcaggcctctgatggtacagacttttttcttgcttaggaataataattccctaaacaatacagtataacaaccatttccacagcatttacattgtattaggtataagtaagctagaggtgacttaagtatacgagaggatttccataggttatctgcaaatattatgccattttacacgagggacttgagcatccttagatttctgtatcctcgagggtcttggaaccaatctcccaaggatatccagggacggctgtatatgacaatcgctttgtcgggagccctcaaataatcttccccaagagttggcacagggataccaggaggagcctgcgtgatggagagaggcctgacatgcatgaaaagatgccactggcaacaaatatgttagtttcaaatattagcctcaaaatgaaagtcacaagggaagttggagaatccaaactgcttgccctgaattgcacgagacctgcttctcacacagacaacaaactctgtgtagcttgccgaaagtcgagaaataatagcagggatttaaataaattattttgaaattaaaccatggctagtggccaaagagactttcaaggcaaggccaaggaggccatcttctgagtaataatactgggagagggagtttgggagcagatcacaaagtccttgatggtcatcctaaaggaactgtgtcttatttcacagtccaaagggggccagagccacaatccagtgataaactcagcaaagtcctccaatgaggttctagaggaatccctgccgatgaaggagctgcatggctcaggcgcctttcagcaatgcctcccctaccaagcgtagccatggtagacagtcagcttctaggtgacatggagtgtctgtgtttctatcactggacgtaacttgctcaaaagccaacggcctaagacaaaatgatgtggtgtcattcaaaaccaacacacagaggatgacagctattagtgatacaagcacaaatctgtcacacaaaaataaaataaacgcaacaacaatctactagaaaacagccgaaaaacactttggctttgaggactttttggaaaaatttgaaaaataccagaactggtacatacttgggccgagatgtgtttgcttttctagcagagtatgagcaaatctgcactttgggtcaatttccacccaaaagaaatgtctggtcatctctctgccctgtgagactcaacccaaatgcactgaattcctcactttcatatacctcactttatgttcacacttggactggagccagatgcataagcaagaaatacagaggagtgaaaaaaatcatttcatccacacaagaaacctggggggcttcttactgagagtcaacaccgggatgagatcacgtgccgtgaaagaagcatcacgggcagggctggtgctaccgactgaacctcgcgcatgtgtgcgttttcgttttctgttttcaagagcttagcagggaaaggagagcggtggcgctctgttctggcacatgtggaagtaaacatcaaggctctaagggagaaaatggaagtatactaagtggtgccactcagggtttatgtgggcttaaaagtgattcttaacatctgtcccaaagggaagagtgtttccacagagctctcctcgtggctcctttttcattcacacatttactcagcacctggttggtgtcaggcactgggagggtatagtgctacagacctgagcaaattcagcccctggtctggtggaacttgtagaccagggaaggggacagacagctggacacccaactgtagcagagtgtcatcgttttacacaaagtagtattcaccttgaagcaggaggaagtgccacttgccagaggaggtggctttcagaaccacactggaggatgaagtgagtgtgcaggcccccagttgggctgcagcccagggggtcctacaggcagacgcccatggagatgggccttggcagtgtcaccctgtggtggactgggagccgtggaaggattccaagcagagatgaatacttcagaaaccaccttctgacactcgagcaccagtaagaccagccaggagggcactgccgtgcaaacagggggctaaactacagccccagccagggcctactgggaagttagcaggctgatccacaggcaatgacaggaggaaggaggaggcaacgtcccagacaaatggaaagagagttgtatcagtcatgaatagggggacagaaggcaaggagtagacttggtgaagtgctggaagaacaatggagcagctgatggcaattccagtgaggcggtgctgaatttagggcacacatacaacacccagtgagagggtggatctatggggtgtgaaggcttggtctaggctagaggtaaagatgtgggactcaacctattgtggcaagtccagccacgggttcatgtgtgacttggttataagggtctgtgcaggcagaatgccagagccctggagaataccaataacaacgagtctctggaagatcctgaggagtggccacagaggtgggaggggaccacagaaagccagaaaagggccacaggaagcaggggaggagagcccttcagggaagaggaaatcaaataagacaagggactgcactctttcctgaacctggcaaccagtaggtcactcctgaatgcagggagaggattcaacagaattgttggtatggataacagcactggactagggagtggatataaaagaacaggtgatctctctagaaatagctatggaggcggggagaggtagggatggaagataagcaggcacagggtcaaaggaggacagaacctcaagtttcctcaatttctctggcctcagtgaatttctctgaaagccccaagcattaaagatggcacccagcagccccaagtcacggaattaaacaccatttcatgttcatacttaaactttacagcaccagagccttgcaagtctgaaggtttgtgataagagaattttggaaccaaataaaatgctccttttgttaggcaatatttatggggcaagtatgctccaaggaatattaaaaataggtcttatgaaaaggggatgaaggattctgtcttagcttgagctgccataacaaaatactgtggacttcgtgacttaaacagacgtttgttttctcacagtcctgaaggctggcagtctgagattcggacgccagcatggttggtgactggtgagggcgcttttcccggcctagagacagccgccttcttgctgtgtccttatgtggtggggagaaagcaagcaagatcgctgtttcttcttataagggcactaatcctaacagaccagagcctgccctcatgacctcatgaaaccctcatcacctcccaaaggcttcatctctaaagagcatcacatcgggggttgaggcttccacacgagaattttgaggggacaccactcagtccataacagattcaatggccaattccatttgagaaactcggctaaacagtgtttctgcgcataagacttctcaaagcctgaaaggtgctaacatgcaggagcagacctgggagactgagtttgggaccaccgaactttgaccagggaacacttccgtttcccttagagcatcttgagagaagagtgttttgagacagtctgagcagtggcgaggggtgtcactccagttgtcagatgcagctgaggaaatgactcctaacaagctagaaaactcataaccatccctagttgggttcaatgacatggaaatttagggatgcagcaagatttcagttctcagatgtgcttctacattgacctgacgtaataggagttggtttgtcctttctacttggccttgacccagtttctggagcttgtttctatgtagattcattagctgcattattcttaggtctcttcaagaagaaaggcaagaggtagtataagaagttggaggagagggcagtagcaacagttgcttccttctattctgcagtatgtgttgcctctgctggggctggaaggctcggatccagaactcagatcccttgtctggcacagtttctagctactgccagacccagaacattactgcaacattaagccctctaattatgttttggagacaatctgtgaagaaatttcaaaatgaagagtgtgtgtgtgtgtgtgtgtgtgtgtgtgtgtgtgtgtgtgtgtgtgttttaacccatagaaacagcaaaatggagagagagcaagacctgccatttaactaaaaactacaccagatacagaatgtggagcttgtaaaccaccttgctatgttccagctgccatgtgacacaagcaaataattgctttatcagcaagaaattagaggaaaataaaagaaccatcaatagccacacctagccaaatttgttagcatttctcttcccagtcttcaatcaaatctattaatgtagatttgggacagcacttcatatacattcaggacaaactggttttgtgtcacagtaagaggtctatgaaggtcacaggcaatgtcgaggttaatcctctagctacggataaaaagagctgctacatatgtgcccagagcagaagcatcttcgcgaagacagcattccaaaaagcacactcagaggatcaggaaaacagcagaatcctgggttgttttgtttccttacattttgaatacacttgcatcatgttaaaaggtgactctgcacagaccaatgcacattctgtcacataccccaaacgtcctctaataggcgttcctctttgagaaaaaagtcctttcaaggttttcgtcccacttttataaacttcatggcacagatcagaaccacagaggctaaagcctaagtccccagtgcagcctggaacagcctttgttctgcttctctgactcctgtccccccttggcatttcttcattctgtgtcgtcgtttggccagaaaaaatgccagcagcaagatggggaactgccttcccagctctctgcgaagactcttaaggcagaagcgaggcctgctgggagaaggctgatgtcagctcttaagagcacagctccctgctcggataaggaggcctttgttttcagctcaactgtgaaaatgagaaaatgcctctagcctgacaaacaagaaacccacacaacacaggtcaggcctgtgacctttacttaaaggtaccacactccattagcaaaacacttccagggaatctgcagatccaagagtggccctcagagaagagcagctctgcttccacctcaggaaggcaggttacaaccctgaagcaaacctcacagagaatcagttcctcggtgacgatcctccctaatgggaatggaaacacacacaactgacatacatggggcaaagtggggggatgctaaagaaactaaaaatcccgatgtaacaacaatattgcagtttccacattagtaatttaggacaactacatttatgaccataaaatatcctcttaaatccccagaatgcctttgggaatacttgtaagatacagtatgaaagtaaagaatatagaatttcagcactgaccctaccaagtttagactatgccaaggaggcgtggcagaaagaaagagcagatagtttgaaggattccattccataggctttgatttatgaaatctagagggaaaaaaaacacatgtcttcaaatacttaaagtaaattataaaatgctccagtttgaatcttttaggctaaggttactattggcttgggccactaacttaaaattgggccacagattttaaacaagaattaaaacaatctaaaaagcagcttcccaagcgtaaagaaaacccttgtttgttcctgtgggattctcacctgtacaaagactcatttcaggcctcttgggggcagctggacagcactcccccttccacaatccctgagggaaccctggtgaggctgtggggacctggagtgtgccgaactactaacgtcccggggcctccacccctttacttccctccatcctcctttgtgtgtgctaaaatgaacagtccccacctcccaaatatcctcagtagtgtgtggtttgagagtgcttaggctgcatcgtcccaaactatcaggcattagggtccagtatcgaatgattcatcgcagttggatatgtgtgctattagcataaatatcccatggtggctgacagcactggctctaggatcacacagcctgagttttgaatcctggctctggtacttaccagagtgtgtgaccctgaacaagttacagaactctcagtgttaccatctgtaaaggagggataacgatagtctccacctcatagaactgtgaggataaaacgatcgtgcccatgaagcacgcagcacagtgccagcgcacaagggctcacgagttgctgttactaacaagccctggaaaaaagccctcccaattctctggatgctgagaatcaggacctatcatcattctccatgatgaaaagttcacctctctctaaagcttgtgtagacatgaacacaataacttgttttgcctataaatacacattactgtttacgacgtcccagctgctagcagggtcaagggactaaaataacctcagcttttccatttcctctgggttcacttttaacctgaaatgaggaattgcttccttcactctcatggaatttgtgaaatagtctcttggtaactggtccatatacatccaaactaaaggctctaaagacatagaagcaacagctgccaaagagggtatgatcatgttgccaaagattttacatccagataccaaaaactacagatactgcagaacatttgaggtctcatatatataatcaactcttctgcaaaagataaagaaaatccagggaaaacccccaatcccattttagccaatcatcaatttcttcttcttactgagttcctattatatgcccagcacctgatttcaaaggcttcctccaaccttttgttaagctgaatgaattcgtggttttgagtttgtttttccctctttttctattcacccctatggtgagaaaagtgaagtgacagggccaggaaaaaacaaaacaaaacaaaacaccagatgaacaatgaaggatgaaaggacaatgcaagcaaaggaagagggagggaagaggaggaagaggagctgcaacaggaaccggagagcccaagcctggaatacacactcaagggcacaccagaatcgggacatcgggctccagcaaacacttcaaaggaagcgtcatagaagcaaagacaacaaggggcccatctcacaccaggaccgtgtttcaaaggccccccatcagcgaggggaggctgcgttttctttcactgggcccttcctcgttcattatgggttgctcagtgggtctgtggcaaacacagctggatggagcacaaggctagtgaccatggctttgatcccagtgtgagcctaggggctctgccctattctgtggccgggggcaaatacactgtaaatatatactgctgatcaaagagaggatgcctgctccaacgggaacgtgggctcaaacagcacttcccctagagacagggtccaattcaagtcaacataaaattatttagcacctaacacatgccagacattggactggtcaagtgtcatcttaaatacatgatgtgcacctctaaagctgcatgtaattccccaggtgggatgtagctatggcatcatcaaatgatcactggtgttggtgtcacacacagcagggttaatcccagctgccaacaacttagacacatcatcctctcacaaactcaatttttgcttttataaaatcaatctgatatagacaaaaagacagagatagacagatagatgtagaaatgtgcctacctagtgtaaagggtcacaattattgtgagagttaaatgagataatatatttcaagtgtccaacacacggccagtctgaagtaagcactcaataaatgttcccttcctcacaggtgacacatcccactctaagtctacacacacacaggtgacaacctcttcatttcagcacagagccctctcaaggttctacccacgaagcagcctagaatgactctcacaaccgatatgaatttaccatactgttacactgcacccactgtttgccttcaagagttttaattctattacaaatacacaagatattaaaatgcacgaggtcatccattgcagcactgttagtattgtaaagcacctgaaattgccaaaatgtccaaacacaggggactggttggatgagctttgatgcatgcaggtaatagagtgccacgcagctgaaatccagagtgaggagctggtaggaaaagatttccatgatgtgtcattgaaaaacacgaaggcggccaggcacggtggctcacgccagtaatcccagcactttgggaggccgaggcgggcggatcacctgagatcgggagttcaagaccagcctgaccaacatggagaaaccccatctctactaaaaatacaaaattagccgggcatggtggcgcatgcctataatcctagctactcgggaggctgaggcaggagaatcgctggaacccaggaggtggaggttgtggtgagccgagattgcctcattgcactccagcctgggcaacaagagtgaaactccatctcaaacaaacaaacaaacaaacaaaataagaaaacaccaaggctgaagtgagtacacacagtaggctatcgcacatgtaagaaagaaggggaaatgcagagaaatgcaaatcaaaaccacaatgagataccatctcacaccagttagaatggcaatcattaaaaagtcaggaaacaacaggtgctggagaggatgtggagaaataggaacacttttacactgttggtgggactgtaaactagttcaaccactgtggaagtcagtgtggtgattcctcagggatctagaactagaaataccatttgacccagccatcccattactgggtatatacccaaaggactataaatcatgctgctataaagacacatgcacacgtatgtttattgcagcactattcacaatagcaaagacttggaaccaacccaaatgtccaacaatgatagactggattaagaaaatgtggcacatatacatcatggaatactatgcagccataaaaaatgatgagtttatgtcctttgtagggacatggatgaaattggaaatcatcattcccagtaaactatcacaaggacaaaaaaccaaacaccgcatgttctcactcataggtgggaattgaacaatgagaacacatggacacaggaaggggaacatcacactctggggactgttgtggtgtggggggggcggggaatagcattaggagatatacctaatgctaaatgacaagttaatgggtgcagcacaccatcatggcacatgtatacacatgtaactaacctgcacattgtgcacatgtaccctaaaacttaaagtataataataataaaataagataaaataaaaaaaaagaaagaaggggaaatgataaaacattcacatatttgcttgatttaccaaaacagaaacacaagaaggatgctttgcttccagggaagggagtaaaaggtgtgaacaagacagggtagggagtaacattaaaagcacactttttagtacagttttaactttggggagcatgttcatatcttacatactcaaaaaataaaatttgaaaggatggaaaaagtctaaaactgaatgcaaacagaaatgaatgaacctaacaatatatttcaaataatacaacaatactgaggagaaaagggaaagtaactcttcaaattcatcctgtgactattataccctcagcatgggagaaggaaaaaccataaacaaatcctgaactctttttagtttgtttttcaaagtggtattggcaccatgcttctgaaactacctgaagtgcactgcaggagtggaccatgagtacatgtgtggatgtagttcttactggtgaaccagggagatagagtatggaacggggagggcgaggaggagctcgggagagttgggttagccctggagcatcgccaggaactcattatctcctagctctttccatggaaaggatctagaaacagcactgttcaatagaacttcttgtgatgatagaaatgttctgtatctgtgctgtccgatatggtagcgaacggccacatgtggctactaagcttgaaatgtgactcctgcagctgaggaactagatttttaattttaatttaaaatcaacacctgtggctggtgtctgctgtactattagacaaatcaagtctagaagcaatgtgatcatagtaacaataagttaccatgaaaaactatgtaatccatagtaacgataacacctagcacctggatctgggcttctaaatcctattccccactaaaaggatctggagtcccctggaaaaacggctaattccatggctggagcaggtaggctacaagatgagcctagaacaacttgtaggccagaaaataagaaagtgctcaacaaccacaaggaaataatggaggttatgacaaggacataggaccagtggacagggttcttgtttgtcaactctgggacagctacaattcattcagtaagacaggaaccccggagtccatatggataataagtagataaataggcaggcaggcaggagaaaggggaagagctctttcttaccagattgcacttgaatatcaagggccattaaaaaaaaaacttactgatttttccacaagatgaatcccactccacctcttcccatcctttaatccactctttccaaacacagagtacttttcaacttccaaacagacattcatcttcttaagacttttcttaagaaataaacagaaataatgtatttctcagggtcaccgtattggaaccaacccaacagtgtcatggataggttaatggataaatgcagaaattgacctttctagtcttaaaacttaaaacttacatttgttttatctgaggtctttaagaaaagaccttcagtcctctcaaaaacaaaaaacaagtgtcaaagaactgaagcccaccaggtaactacatccagacaaagagatgtgggaccgtccttcatcatgattgtgtccttgctcctcccaagttcctatttgttaaatcttgtttcatttcttccctgctatataaaccccagctttagtccatcagggagatggatttgccccatctcctggactgtagcacccaatgaaagccttcttccttggcaatactcctcatcccagtcattggctttctgtgtggtgagcagcaggacccagaccaaacccctggtggttcggtaacaatatcaacaaaaaaattaataatgagttcaaatacaccaggtcctaagaggctggaataaaatcccaggaattctaattttcaaaattctgaagaaatcactaaggaaacctctctttttttccccttcccctaaatcaaactggatagaactcagtcttactctctgttgccttttttttttataagacatcatctcgctctgttgcccaggctagtgcaacggcatgatctcggctcactgcaacctctgccacctggattcaggcaattctcctgtcacagcctcctgagtagctgggactacaggcgcacaccaccacacccagctaattttttttgtatttttagtacagacagggtttcaccatattgatcagtctggtctcaaactcctgacctcatgtgatccgcccaccctggcctcccaaagtgctaggattacaggcacgagccacctcgcccggcctctgctgcttcttactctggctcagagccacctgatctctccatctttctactagaaaatgtctccatatgatgcttataataaaatgcagccaaaccgtgcacctttcaggccttgttagctagctaccgaaactattttttctttcttcctctctctctctcccttccttccttttttagaggcagggtctcccttttgtaccctggctggagtgcagtggtgtgatcacacctcactgcagtcttaaactcctgggctaaagctatcctcccacctcagcctcccaagtagctgggagcaaaggaacactccaccaggccaagctaatttttaaaattttttgtagagatgggggtcttgctatattgcccaggctggtctcaaactcctaggctcaagcaatctgcctgcctcagcctcctaaagtgctggaattacaggcatgagctagcacacccagccaaaactcttttccaataacactcctttccccagaattattatgactgctttagtgataaaatacatcacattttcattacatgttattaacaaactctaagaagataaagcacaaaaaccattttgtaatctccttaaagagatacactaggctattccttttcaaataattatgaatctgtcatttattgcagataacttcttaggcattaaatataaaggagggagcatgctatagcccaaataggaaacatttcatcaaacagcagcactaaataccctacaacacgaagaagtaagacaggcagcatctttccaatctgcctgtgaaatctgtcattaggctcttagaaaacacagtacaaacaatggtaatgttactaaaataactatcacacagtaaacaagtaacactcagaaggacctaaccacacgccaatcgcctttcctccttacactgtacacttaagaaaatacattttataatatatatattttttaccacaataaaagaaaaatgaggggggagtcacctggctggtgtaagggagtctgagagaggaggttactcctgtttctattttcctaaaactttgcataataatgtcaattgtgatttgcacataaaatttggcgattctattatttacacttaaaattatttatagtgtcatcacagacccgtacctcaaagtcttatttttagccaccaagagagctacaaaattattttcttttttttttttgagacagagtctcgctctgtcacccaggctgagtgcagtggcgcgatctcggctcactgcaagctctgcctccaaggttcaagtgattctcatgcctcagcctcccgagtagctgggatgacaggcatgcaccaccacacccagctagttttttgtaattttagtagagacagggttttgccatgttgcctaggctggtctcgaactcctggcctcaggtgatccacccaccttggcctcccaaagtgccaggattacaggtgtgtgagccactgcgcctagccacaaaattattttctgaacattttaatattctaataataatattaacaatgactaaagctgagtacttactatctgccaggcaccattcttaagtccttacaataatcctatgaggaaggaattaatattatctgtgatgaaagataaagaaagtgggaattgaacccaggcattttgattaaaaggcacatactatcaaacattaaatccaccatatatacatatgtatattttcttactctctatcatcataaccagtatctgaacaatggaataaaaataacaacccccatcaacaaagtgctataccatgccaagctctttgcatattttaactctagtcctcgtaatagctctatacattaactattatcattgtcattgtcattgtccaatgacaaggatatcactgtcaaggatactgggcccagctaaattaagtgacttgtccaaagcctcacagctgttgtgtggcagaatcaggatttaaattaaggcatgtttgtctgcaggctgccttcccctttcttacttatgaaaagaaaaagaaaaaaaaaaaaagaccaaatgttcttatttgggtttgggaaaagcagatgggaaagtataagaaattcgtgggaataaaagaatgaactgcaagagctgagcacccaggagttaagctagccctgcctgcggagtgcactgtttgcagggccttcctgctggattcctgatggtagcaaattccagggctccagactgcaggctcagcctctgactaacactgcagtgatttatttgaggataaatacctctgtcagtgtcttatgactgaacacaacagtccaagctgactggaacgagcggaatgcgaggacgctggagctgaggcagtagaggcgggagctgggccacctctctgcggaaactctgcctccaaggaggagccctcacaggaaggtattcctgtggggaaaaagcagtgccctcaggaattggagcatcttgaataatgaggaaacactgactcatgctagagtgagcgcttgggaagggggaaggaggaggacctctgtacctgcacacacaaagctactccctccaatactcagtgcaaccttgccaggattggcaagataactccaagaacaccaaccgccctcaccactgtacccgtagactctctgggcagctggtggggcgtctccaagtcctgaaaactggggagaagcctctccctctgcgaggagggtgtgtgccgagaggagagtgcaaaggggagaagccgggtgcacggaagcgggaggcttttccagtggaaacatggtgacgttgcacagattcagggatctgtggtttcagcccgtgtttcacaaataacaaaactgaggcccaaagagttgaagcaattcatgtcaagaaggtagacagtgtcagtggcagatcaaggactggctggatgtggtgagtggcaccttgtcatgagcataggaagctggcttccctttatgggaaggtcccaagtttgtaccaggggcacataaggtgggatgaacacttcttcgtgtgtacaatcctagactcctgagtaagaactttacagacgtctgcttggtcaaaaaggtgctgagcttcccttctatttgtctggtgcacagtgacattcactaaatgttgattctcctaaaaacaatcaatatgtatgggcaaaaaaaagcgaagcttagcagatgactactcgactgctcgcagaagctctaaggggacattaacttctatggagtttaacatgcggaaggtcctacaagtaggctggagggaagccagacttccacctcaccgcgagttatcaaaatgagtttactaccttctttttggcagatgaatactatttttcttttgtaaataatatccttttcaaataaagtatgcaaatgataacatcagaattagcacaaagttgcaaaacaaataaggccccagcacggagcacccttaagccaaaataagaacagaggaactcacagatgggggttgaagatgcgactcattttggagacgtggtcgttgtcacagtctaggtcctcgtcacctggctccatgctgaacttcctcttgctggggctgattgggggagggccggtgcggtgactgctgagggcagaggccaccggcagggtctgtattctgggttctcccctgagagcagcttcgcctacgcagagagagatgatgtagtcactaagcaggagaaaggcccccatctcagtcccccaggctccccgcccgcccagccagccccttacaaaactactcccagtggaaagtttttggcaatgggacggggccgcctgccatcctctgaacatggtttgagtgtggttagctgccaaccatgagacattttacatcaacgtggttttctagcacagtcactctttagggtagagtttaaaataaaaagttgcaataaaatagcaggggggaggcaaaaagcattttctgtaaacaatttcaaaagttaatttaaaacaccaaaggtcttttcacgtgtgggtattccactcgatacagataggagaatgacctcactgcattcatgaaaccactatgcccaactcacttttcctgcttgttctgttttttttttctaatatagtcttggtatttaatttcttttaaaagaatgaggaaagtgtgtgggctaacagttcacacatttgtaccgaaagttaaaagaaatataaatacatcgtttaatgggaaataaatgtttaattcttacagtacgctaaatattgcacattaaaatattatcagcacaaagcttcggcatataacttatcgcaagcataatacgtgggtaggtgcagttctgaaacatgtttcgaagttaggcaatcaaattagggtccacatttccatttgatttgacatcttggcgtttttcattattattttaaaaggttttgtactaggcaatcactttgtgcctcgctgtgaattaaaataagcatagcctttcatagtaataaagcttgtgtaccttctaaactttataaagacgaatgattactttaagagaaaacttcaaactttctaagtcacatggggggagcacctaaatttttcacaaataataacccttttgttgtgctgtacattttggtctctcggacctgaccaattttctttccatttggtcacaatttgagagtaatacgaggataaagtcaacttcatccgaggccttgtggtacctaagaaaaggaatctttgtttgccaccactaattttcatatcatcacagatgtgtggacagtgttaacagtcatttacttcatacacatatgacaaatatgattttgttggagaaaggagtgaggaaaaaccctctgaatatttaccaggaaaaataaaaacttggccaatttactcagcaagatataaactagcaaatatacagtgacccataatacacctccagccaggatttcttttaaggattctggccccaaagcaaactggaactttccattttaaatgagatacctaaaacacaggcctcacgctggcctgccacactcagaaattcagtatgatcttggttggcctatactccctatttagtaattttcattttaaaaaacaaaaaaagcagtgctcatctttataccttcataaattagaaaaatatcctttctaattatctccgttatttgtgatacttcctcctccacaaagagagaagagggtgtttccaagggaaagcttcagaagcccaagcccagctaactttctgggaagccctgatgatacccccaggaacgcagcaactgcaaatcaaacctcatcaaaatggcaccagctgaccctcctctccacccagggtttctcaacacccctggcaggatgcgaggggatgaggagtcctcgggcttggacccccgaactgtggtcatcatttcatcagatgccagctgtgtagcaacaagagttgctatggaaaacaaccactacagcaacagactgaaatcactccaaaaaaggagccgtcactcattccaccagcatacactgtgacgcggaaagcaaaacccttgggttaagaacaacattcccactcccctccccagtttccatcctagtaaaaattctcgtgcttgtttgcatttttaagttcatccaacggatgcagtgcttatctttaagactgaatcactgatgtctaacatcgaaaaaaattccacaagaatcctcagaaaacactggagatttctaacccacgggtgggggtgggaccagggctggggctacaggccccatgaaggcactccaggtgtccttcaccagggactgtgacagacgcctccaccaggtcccggggagacggtggtaaatgcgtgctgtagtacttcagcatctcagcttgccggcgccggaaggagcccaggaagcacggtttgcctcatttgatggatgacgaagctgtgccccaaaacatagcgtgacttacccaagatcctccagttaacaggttagctggaggcaagaacccatggcctctgcaatcagacaacgcctcatcctaagactgtgcagcctcacacaaggcttacagcaaaggaaaagaatccgcacataaggtcagggacaggtccgttcagttatgtgcctttatgcatctttggggcccctccctagatggccttaacccaacacttgtatgttagacaagagtggtaactgttgtatgtgtggtggggttaaaattatttttgtaaaactgaagcagacatttgttctgggagataagacacttgcattgcaatcttgactcctcctttatttaggatggggtgaatttgggcacgtgcttcccctctctgggcctccctccatacaacaaggggctggactagctaatgtgtcatgttctttccagctcttagaattactgatgcaattctatgatcaacaagtgaccaaccaactaaccaacatttacaaagaaattgctacttgtgtaatggtgaactaagacagcaaaactcaaggtatgtacctcagatgttattcatcgaaaaaaacaagggtgaccctggggtcaaataaatttggaaaccgtgagattgaacaacttttacaggagtttaactacaggcctttctgtcttctaatgcatctcagtctctgagatggaaaccccgcagggctgctttccatcgcccgccacgcccccgcccacccccaatcctccacagctctgtgaattccatcttccaaagcgcccccacgcccaccccccacccccaatcctccacagctctgtgaattccatcttccaaagcgccccacgcccccgcccacccccaatcctccacagctctgtgaattccatcttccaaagcgcccccacgcccaccccccacccccaatcctccacagctctgtgaattccatcttccaaagcgcccccacgcccaccccccacccccaatcctccacagctctgtgaattccatcttccaaagcgccattctcagcatgttggcccatcctcaccccagatatccagtgactgcagacttcttctgcattcgaaaccccaactgcctttctcatttttattcctagtattcctctttatgagccctgaaaatttcagcccagtaagttaaactagactcatcaccattccacagagaacttgttcttcccccaatcttctcatttaagttcatacatcctgcaaaaccacttaaaatgcctcctccatcaggctgtcctccttgattcctccagctgaaggtcatctcctcttcctctgaacatctatagaaacttatcactctggtgcttccctccctactttattttgtgctcctggaagcaggtggcatttaattcatttaataaacctgacagtgcagagcacaactgacctactgaatcaatgaggcaaggtgacagggtgggcagtttacagagctttaggatatgttaaagatcaaagatgttatagaataaggagtgtttaaagatctatttaaaaatataagaactcttacaacaattaaaaagataacaaaaaatagaaaaggatctaaataggcatttccgaagagaagatatgaaaatagccaataagcacatggaaagatgttgtattagtctgttctcacgttgctgataaagacatacccgagactgggtaatttataaagagaaagaggcttgatggattcatagttccacatgcctggggaggcctcacaatcacggaggaagccgaaaggcatgtcttacatgatgacagacgagagaatgagaatgagagaaaggggtgttcccttataaaaccatcagatcttgtgagacttactaccacgggtacagtatggggggaaaccgcccccacgattcagttatctcccaccaggtccctcccacaacacgtgggaattatgggagctacaattcaagatgagattgggtggggacactgccaaaccatatcagatgtccaacatcgtcagccatcaaggaaatgcgaatcaataccacaaagagataccactaacacctgttaggatggctatgatcaaaagacaatacaaaagtgttagcaaggatgtggagaagctggaacacgtgtacgctgctggtagaattgtaaagtggcattgagaggtgaggccagctggacttgtaggttgggtgaggacttagagaacttttctgtcttacaagaggattgtaaaatgcaccatcagcaccctgtagctaggattgtaaaatgcacccaatcagtgctctgtggctagctagaagtttgtaaaatgtgccaatcaacactctgtaaaaacacatcaatcagctctctgtgggtagctaaaggtttgtaaaatggaccaatcagcactctgtaaaatggaccaatgagcaggacataggcagggacaaataagggaataaaagctggccactccagccagcagcagcaacccactcaagtccccttccacgctgtggaagctttgttcctttgctcttcacaataaatcttgctgctgctcactctttgtgtccgtgccacctttaagagctgtaacactcaccgcgaaggtccccagcttcattcttgaagtcagcgagaccaagaacccaccagaaggaaccaactccggacacagcatggccatggtggaaaacagtctgacagctcctcaactgatgaaacacagagttaccacataacctagcaattctagtcctgggtacataaccaagagaaatgaaaacaatgtccacacaaaagcttgtacatgcatgttcatagcagcattattaaaatagctaaatagtggaaacaaccaaaatgtccatcaactaacagatgtaaaaaatgaaatatccatgatgtaatattatgcagctataaaaaggagtaagatactgattcatgccatgacacagatgaacctacaaaacagtatgctgagtgaaggaaagcagacacaaaaggccacctactgtctgattccacttctatgaaatgtcagaagagggaggctcacaggcagaaagcaggtgagtcggtgctgggggctgggagaagggggaatgggaggtgacagttcacgggtggcaggtttctttgggggaatgacaaaaaccttctaaaattgattgtgataaaagttgcataactctaaatatgctaaaaaccactgaagtgtattgtagactttaaatgggtgaattgtatagtatgtgaattatgtctcagtagaaatgttacctcttcctcctccaaaataagaatatatttataagcagtataaggctccaatatcattagattcttttttctctcaggcttttcacactaaactattaaacaattaagaacaggcatttgtgaatttccccagaaataaaaacaaaccttttgttattacagttacatctccctagaatattaaagtcagataatttttaaaacattatttattaagctaaaaaaagtcaaatcagtgaaacacttgaggtgacttaggctcttggattcatcagatcctataaagctgcagctcagcttttaatcagtgtgtcgagtgcctgtgacacactgaaggctgtgcaaagtactgtcacaaaaatacatgatgaaatgtatacagaccctgaccacaagggtgggaggcaaaagcacatacaccaaaaggaacttatcttgggagtgcaagaggcttttccctcttgttctaacatgtattcgaaatttcacaatggtctggcaattgaaaaaggagaaaagattatctttctttttcaagaataaacagaaggaagatttgagctgagtaaccccgtattttaagctttacaagttggcttaactacaactgtcagttttacttctttcaaattcccaatgacaactaaagaagttttattttttaaatgtatttggccttttacatgaagataattttatctaggcacacgttagaaaaatgcctagataaaatgaagaaaaatgccgaatatatacaaaattaactcctgtggttttttggcatggtggcaattctaacacatggatcaataatattccttcaaatttccccaaagaagataagcaaagattttggcctaagatttcacaagaatcagcatgtttatttcaatggcagagaagtttaacagagagaaatgaaaagagagaatcacctcgctttatgctgtgctataatatgattttgacaaaatatcacaagaaaattctgctttcaaagtcaaaatagaaagaggggaggagaacagggaggaaccgtggaaaatgtaaccccactgtaatcctgtcattaccatatctcaaagattctaagactatttcctacattttaatattgctaagactgaagtttatcttacaaataattggcatatattaacagccaagattgcttctttttcagtggtacataaaataatgattcacacagaacctaactccagaggcttcaaaacagcactggtctcttcaacctccatttttttttggagacggagtctcactctgtcgcccagactggagtgcagtggcgagatcttggctcactgcaacctctgcctcctgggttcaagtgattctcctgcgtcagcctcccgagtgtagccgggactacaagtgctcgccaccatgcctggctaatttttctcaaattttttagtagagatggggttttaccatgttggccagggtagtctagaactcctgatctcaagttatctacccaccttggcctcccaaagtgctgggattacaggcctgagccaccgagcctggcctaacctctgtttctttactcacaaaattaagtggtttgattagatcatcttgacagcctccttttggctctaatggactacatcttccataagagatacatcttctaaagttaagtttccttttactgctcatcaagaaatactttccaaacttttacagaacacactttacatagtggtagaaaaagcagattcaacaaagcaatcaactaacaaaattttttgagattagctaattattagcatctcatgattaagggagatttcattaaaaaacaaggactcttctagttctcaaagttccagcaacattcatttattcgaatactacaagaaagttgtagccagctgaaacctggacaaatagaatctggttcaccaaatgcagattcgattttcatagaacagaacaatcaaggccatgaccttcaacacagagatggggcgagtgattgggtttcagggggattaatggactctcccagggataaggcggcgttagcaatgggaacccgggtctcggccacatggcccctcaccaactgtgcaggcccatcgccagactggggtgtgggctgcatgggaggcgatggcatggctctgagcaattaaccaaaataatggtatttatgggcattttctggagattagaccaacagcacagggtgaaatgagaatgtctttatggagaaggagagggtaaactacagtcaaatgtatcttgctgtaacttttaaggatagatttttgacaaagatctctatgccgtgccgaacagagagtttaagtccacaacttaaatctccgctgtgtctaaggctttacgttcagcccccctcccagcccctttatcatgtttgaacctaaatcaaagaagcaaaaccatagctcggtcggccaagccagccgcgctgcactgatgtgtctccttcaggctgaccacagcccatggcaaccgactgacatcatgtcctggcgagagggcaccctggtaagaggaccctgctcccagattccacgcccctctcacatctcaccctctcatcactgtgcagggcagaagcccccggcagccagggcttactcactttctttcaaataatacttctttgtctcacggtcgagcagctggggagaagacaccgtgaagtcaatctccttcaaattgttcaacttgtggctagccccattctggctcacttttttctttttttataggacgcccattgcaatgcgagccggcagataaaagccgtgacgtgctgtctgcccaagcgcaaggatcgcctgcaatcccccagcccttgggtggcaacacaaagcacctctcatactataatgctctgggcggccccaggctcagctctaatcgtgcagagcctgacctcgcctcgggggagccggctggactgggaagggctgtgcagggtccacaccctggactgggcttggtttgagcagctctactctttttgtttaagagcaaagatgagattgtgttgagagagtacagcctctatcttggactgctaataatatagataaggataacaacagcacaataaaactggtagaagtgaagcatatgccatcttcactagaatttcaaggaatctaaatcatttcatacacactatactttgtagaagccttcctgtatcttctatgagtgtgttttattttataagcgtattacaacatgatctattgttctgacttttcttaatgcagccctgtgagggaggcggggaagaagagctcccgccttgcagccggggaaactagtgtttcaagaattaagtgaatttctcaaggtcgcaaagctgattaatggaagcactggaagtagaaacctgggatttagactccccaacttccatcatctttctaggtgtgcaagatgcttcactggttgaggaaaataaatgggaggaagacagttgaggagggaggaaggcggagaagagagggggagggggcgggaggaaggggagcttattggctgaaccatgcccacccctggaattaacacgttaaagtcccaaaccccagtactgcagagaacatggctgtatttgaagacagagactttaaagaggtaattaaggtgaaatgaggtcattaatccaatctgactgttgtccctataacaagagattagggcaaagacacattgcagaaaggccaccatgcgaggatatgggagaagagaaggcggccatctgcaagccaaggagagagcctgccggagaaataagcccgctgagtctttgatctcagacttccagcctccaggaccaatgagttaatacatttctgttgtttaaaccacccagtctgcggaattttcttctggcagccccaggaaactaatccagagaggaaagaagagaggacgggactgaaacctggttctgacaccaaagatgaacagctgcaactgtcccatctgtctgacctaacatagtgggactgagatgaaagcaactgaacgtacagatgccgcttccagaccagaaccacctgagcacaggaggaaacaaacacatggactggcaagggaggagaatgggtttcctggctgggcactgggcaagtggacagctgcggcctgcccctctgacttggtgatcatctgccctgcactagccagaggaacctcgacctcccaggaattcttctgcttgcctgtaagagaggaggactaggtttgtgttcacaaaccaggctggggcctcctttggatggggaggcagtgggtctgaggtgggacctgctcccagacatgtcgtactgatgatactggtgcaggagggatggtgtctgctggcgcctctggttttaagtattaatagctataattttacaggggctgaagggaaaaagataaaagaatgccaaagaaattatgtctataattctcaacatctattgtgaatatacactagttttttaatgaactgcagttactctgaataccaaaaagcactaaaaatactttaaattaaaacttgttatcacatccacacattgttattcatttaattaggaagttctatactgcttaaaatcattttattatcttcagggctaatagaagtccctgctgtctcatttaccctgttggatttagtttacaactgaactgtatcttgatagactatgtaacactgcaacctccgtggaattgagtaagtggggtcaaactaatgtcttactatacatatcattttggcttgaagaaaactcaggtatgtaacacaacacaaacagcctgaagatcatcagatctaggtttgaggttgggttttagctttgtaaatcataagattcaaaaagatcaaacacaaaacaaacaaaaaagaatgaacactcatccacttccctggtttcccgatgcagatttagtaacgacacctaccttctattcttggtcctccattccctagactctggctctcaggtagcctcagaggcctctgagtaaactaggaaagtgcagtccccgcttagagtgcgagctccgctgtggctgtgctcgtgcaggctaaggactggcatctgcctattagaacagtggtccaaagggtcacatgcactgacatggccctgacacatcaccggtgaaccccaaggagacaaagccagctcagaacctttaacaccaagtgcacagtcctccttaatggaaaaggctcttaaagcctggcagaaattctgcactatatttacttgcaaatctacttttgtaacattttactgttaatgaggaggaggagagttatgaaagtaaattgttagcagatggtattggaatcaggcactttgctgggggctcaatttcctccctggtagagcttataaatgtttagaaggagtagctggatgagggtaagcaaaaaaaaaaagaggcttgttcaaacctcttcagcagttgagccaagcctccggagggaccctggttgccacgaaacagagggattaagctggtaatggtatgatctcttcaaaatgtaagtgttttggtaaaaatactcaaaaaacttctgtctgcaagccctgtaccatgtgacaggttaagcaccgaaggtcatatgctaccatctgcattttcaagacattctttaattggagggagttccagagggtacgactgccacaggccctgagatggttgagtcctggaatcaggcactgatcactagagggggaaaaaagagacacagtcttgcaagtgcagagagagaacagaaaactaaactttccctcttctgatctcccgtaacactccgagcctctagaatggccctgcccacaggctgcctaatggaagaattcaccacgtgctgctcttctctgtaatacctcgcacgtggtcccgggtactgttctgggaggcacggagcagctcattcatttctgtatccctggccactctaccagtgacagagaaacatagtagaaagtgggctgtggagtcagaaaaatgtatgatcttagcagtctcttcatctctcttgagcctctatccaactaccgtgagggatttctatgcgaatcaatgagaattcatataaaggtcccagcccagaacaggcaatttatttattacactgtttgttggattccatctgttggtgcaattcccatttgaaggataagatggctgaacaaagggaacctctaactgtccttctcgctactcatgacaggcccccgcctcgaatacagtcagccactagccgatggaaggggtcaggagacacagtacccaagagcctgggtgagtgggtgctccgaatctgctccaccaggagccggcgacgtcatctcagagcagctgcctgactttctatgactgtttccacatgtgtgaaaatggtagtgtgaacccacacacaggctcagagcgatacccggcacggtgccgcctcctccccacacacactctggacttacaggctttcttccatgcacgtttctccctccctagaatgtgttcagaagccctctctgccaatgcatactcatctgcactttcaaaacccgacttgagtgcctcttgtcagcctcagccccaagagcaccccttttggtgccatctacctgggctgagctgcctggcagcgtcccttgtgacgtgctgctggctccaactcaaaaactactcatttctcagcaacaccattgtgtgctaccgccaaacaggcgatcttgctctctgcagtaggttccagtccagaccctgaggagtaagatggtggtcccggaaaccagttcaaatttctcactggcatacagagtgctgaaggaaggctgtgtataggccccccgattctgatcgtgaaatctcattatcagttccaagccccccacggagctgcagtgggcaggtagctgggacgagacacattcccaagtcagatatctcagccagccatccaggtttcccacggaaattcattaactcactgtattccttactattgctaaatatgctggtttcagaagccacagagtgaattttccaaggattaaaataggacacgaagttcaaagatgtctcagtcctgacacagtggaagcagcattagggacttgggcacgcacaccattcgagagcctgacaaccctgaagacaagtaaagcgagtaacttaaagtcagcttcagtcaaccttactgctgaaacagctacatgcccaagtaaatcattttaatttttccaacttttaatttcaaaaaattttaaagctacccaaaaagttgaatgagaacaagaacatcccattctctttaccttgattcacctatcataagcatttttgtcagtttgttttagctacatgcatacacgttttcttgctgtgatttttgaaagtattaataagtgggagacatcttatttcacccataaatacttaagaacagggacattctccttcagagccacaataccattatcatacccaacaaagttaaagttgacgtattgtcattatctaatatccagttcacattccaacttcccgaactgacctgtctcttttttggtggcagggagggttgggggaggacttcattaattaagggtcatatgctgctcagtgaagttgtcatgtttctttaatctcctttcatctaaaggaattcttttctctttcgtgacactgatgtttttaaataatgcagaccaatgagctgtccctacaaattttggtggcctaatcatttctttatgattagatctgagttaaatctttttggcaagaatactacccaggtgatactgtgtgctcccaccgcactgcaccacaccggaaggacctggcgccagcccatcccatcactggggaagcagagcctgcagtacacacagattgctccttgctctgttagaaacaagtaagctcctcccttttgtagtaatagtttgggggtgtgaatcctgtcattgtcactcaatcacatactcatttttttgtttgggttctgtttttctattatttttatttcccatactcatttattacacacctttaatttgcagtttgagagtgcagagctaagctggattaaagacagggtccccagatacaattcagcacaagtccaactggggacacattttcatacaaaacacattgaaagaaagacagacaatacaatcaggagtagcttatactctgcctggaataaagcaggtgcttagcaaatatttgttgaataagggacctgtatggttcaggcaaataaaagctattaggccaatctgcatcctttccattcttccttctcacatcacctcacccctggggctgaaaggaagtcttcgaacgtggccaccctgcctcccaccacgagagatcaggatccctgactgattggattgccggagtaaaggctcaactgcctcaacctgatcagcccatctcaccctctctctccagccttacccatctctctttctcttccctcccccgcccctcagactccactgctcctgaggtgtggtctgcacacgcaggggatgcctcccacctcccctcccacctgcctggaacagtccctcactttcaggtctggtctagagtgcaagcctcaccttcttcaagctcttcctcagcaagtaagtgttccttggtcttcagtgtctgaaaacatttacaagcatcctgcgttatggctcttaatcctatcgcctaacggtggtactatttacaaacattttcacatggctaggaagccttcaggccacttcctagacccagctcattccctagggcctcctttcctttcctagagcaggctccagggataagccctgtccttgtcctttgctatgtcctttcataaaagctgccacccatgctctcttattgagacagtcctcatcccaaaacgatagtgaagtgggacttgtgtccctgccacatcaccccaaaaactgacacatggacatggaacctttatttaaaaggctaattgttgaatccagtcctgtctaaagaatgtatacaatttaggactggcagaaaaaaaatcagaggatgtggttcagtgaaaggcattgttgtgcctgggatgtttgtaggactactccaggaactaaggaaaacacacagatgtttgagatctggtctttgcctcgaaaattttagttctagtgggagtgataagttatggagataaagaactgtaaggatggaacattataaatgccaaaataaatcagatgctcttgaaatgggtgaattgcatggtatattagttatatctcaataaagctgttacccccaaagagcttctggttatgtaggttaatctactgacatttatcatagtaggaattaaaatggggaagttttaaaatattaattaatttgaaataaaaaataaaaagagatgcactttttatttttttaaaaaaagagagcgatgccacacacattttatatgagggagacaataattctaactctaacaggagtgggatttgaaaaacaggcaggatttggacacttagaaatgatgggtatgagcattccaggcaggtacaagagtatgaggcaaggcagagagcaggaatgatgccatctttgtgcgagagcaatgggactagaacaacgggtttgtttccttagacttaaggctggatacagagaggtgggtcagataataaagggctctgaacacaggtgaacggctgagacctgacgaggcgggtcactgacagggagccactgtaagcactgacacagctacagggaggcttccgtgaggggtgctccaacacaccatgccagatgggtgcacacacctgagtcagggaacagggcagggacgcaagcgttacgtgaggaagcttcaacaatgttcctatcagtgaggatggagaagaggcaggttgaagacacattttaaggaaagatcagagagctggtattccagctagtattatacattgacctgatctttccgaaacaggccaccctcagcttcttcctaataactctctcaatgttgacccttccttcgtataaattgagaaactatgagatgaacaagccaggaagctacacttgttccctagcttatcaatatgtaacaaggaagagtgagttagtgctagaactccatattttaagttccacaggttgatctaacaaagtctaattaacctctcatatttacatttcaatcactgtcaggtgacgtttttatgtactaataagattccatttttattcttgaagaaaactgtcagtatactcattttctttaaacaatttagatgtccactgtttgatggcaggggttgtgctaagagcttccatttatccatgattaatcaacatttattcaacagacatttcctaaaatctgagttgtgaagaacatcaaacaaatcaaataataatgcatacttatagagggaaaaatctgaataccgatgtttaaaaactgactccaatgaaatctacctatattaaaataaaccaattctaaaaaatcatcatccttcattagattggtgtcaggctaatatacagatatgttgggtttttcacagtatatggtatattctggagtgcttttacagataaattttactcaataattatagtttatgtaagctattattacaagatgtctgtattatccaataaaaaaactaagaggctattagaactgaagtcaaaagtatgtgactagcttgagaaagtattaaaatatttattggagagttactggagagtcaaacagctaatttcatacatgggtaagtaattaaataccaaaatgtatttatttcttaagaaaaatggcttaataatggtgttcagcataaccaaagaataggtaaatctgtaaagctgctttttaaaggtgcaattgcagacttattccacagattttaatgttaatgggaaatcgtaagatccttatgcaaaaattatacacaatcaaggacttttgtttccttaccaagctccaagaaaagagactattaaataataaagtaaaaaagtcatagaatttaacctgaaaacaaatattccattagcatgtaaaatttaatgtgtttcctaaacaaaatcatccccatgatgccaagaagttttctactggagtgtgaaggtgaaggaggtttccccaaattaatcaacctaaaatattgggggatggggatgttgcttacttttcatttctatttctttctatcctcccacctctctctctttttacatttacattacccagtgagcaaattttatcaatgagaagccaggaagggctgactccctttggtatatttacttaagatataaaggccaatcaaccattgtgctcagaaaagttgtggccgtttctgggcctacttcagatctctccttagctccaagtgacttattatgaagccaaagaaagaggaaaactgagctgatcaaaggccaggctgtcattaagtgaaaatgatggaagatgaaaggcttgccctgcacttcaaaggtacagctgagctcgggtgagctgacagcaagcgatcagggatcagagaggcaggcggtagcttaatggactagatgacattcctagagccattcatctttataccaatcacgaaaaatagaaacataacgacaaacatgcatttaaatgctttcctactggatataaagaagagtgggtaacccaaaaatataaagtgacatacatcacatctacacttacagaatataaaataatgaggtccaagaactgttgaagaagttggcatctctaagcagtgcagaattacatgttaacagtttttccttatgccctagggtgtgtaatgcaatgaagcttaattttgagagaccatggatgcagcagtctcacttccctggtgggctaacgcagaacacttggtgtgttgacgcggaagggcggtcaaacttgcttaagattttggggttagagctggtctagagccaccatagggctggggaaggaaggttggaaaaatcaggccgattgatgattacacaatattccccttattccaccccattcacccctgtacagtgccctcccacccatacacagaacctcagcagacagaggcccctctaggcagcaaagatgttacattgtaagaggcctcaaggcattaactcgagtctcctttcttttctttttcctctgtaggaaccaacatgcatctaatcttctaagactccctagaatgactttaatacaatggaacaatattatctgtacttctggtcacactggagacttttcagggaattgactgggtttctcctccctatagtttattgttagtggtggcagcacctgcaaagagcagagaaaaagaggagagagtgccaccccccggcaaattagtaatcaggatgttgggtactgagaagagatgctctagaagctttatatatgtgaattcatttcgtactcctatttacctgtgaagtaggcactatcattagtttcattttcaggaggaaatggtcaccaaaagtggctcagcaacttgcccaaggtcacagctagaaataggaaagactggatttacacccaaaggtctggccccagggactatgtttccaactcctataccactcggagaggtttcacagagcagatggtgaagggtcagcaggagtggcccagtgaacaaaatcctgcaaggtcggcacagcctgagggggcaacagcacagcacccctgagccagcagggtgagggcaagggtgaagagcagcaaaaggtgccggagggcagggtgagccttggtcatccaaaggcgttagcaccccagggccgctaaagtaaacattgatcatacgtaaaacctttgcttgcacctcttccaatcagacctgccactaccaaaactctccttctctatggaaattccagagctaccttttctactgagccacgctaaataaagagctgggacttacttcgcggaaaatttgggagccaatgacaacattcaggctggacaacaataaattcacaactccccttggccatctctgtcctgggcccttgctgaccggctccacctggaattccatcccctccttccctctcacccccaggacccgaccgtcccaccctgtgtgcacatatcatgctctgtaaagatcatctgaatgtacacgtaggatgtcagtttgcttcttgtaagatagctagtactgattataaagaaaacaacaattccagattgtcagctcctcaagaagggccctgggtggggtgtccagagagcagcagtgaatgccccttaccaccagacacaaagcctggcactcaggtgttctctgaatgaccgataggtgccattagtaagatttataattgagctaatactttgcacaatattttaatgtaagcaaatgcacacacacaaagaactttgcaaagaatggaatgaatggagcaacaatattctccacattaagtctccaacttttataatagctttattgacatataattcacatgccatataattcacccattaaagtgtctgactcaatgtgtttataattgtggggctgtgcaacaatcaccatgatctaattttaggacatttcttcaccccgaaaagaaacccatacccattagcagtcactccccatattctcctctctccaatgcctagcaaccactaacctactttctgtctctatagacttgccgattccagacatctcatataaactcaatcatataatgatttggtgtcttttgtgtctggttctttcactcataatgttttaaaagttcatccatgttgtaacgtatgtcagtactatatttcttcatattgccaaataatatttcatcgtatggagaaaccgcattttatccattcatcagctgatgggtatttggattgcttctactttttggctattataaataatacttctatggacatttgtggacagatttttacagggatgttttcaattctccagtatgtacctaggagtagaattgctgggtcaaatggtaactctatgtttaacatttcgagcaactgcaaaactgtttccaaaacagctacaccattttacattcccaccagcaacgtatgaggcattccaatttctccacatcctcaccaacacttgttattgtcttttttatttcaaccatccatagtaggcagacctcactgtggttttgattttcattttcctaatgatgttgagcatatttttctgcaattcttggccatttatcttctttggagaattgtctattcaaatcctttgcccatttttaaataagattatctgcctttgtactgttgagatgtaagagttctatacatctcaatacaggtcccttctcagacacatgatttataaaaatattttcccattctatgagttgtcttttccttcaaatctattattatagttacctacagccttcagaggtaccaacaagaaacctttacaaaaacctaaccttcatcttacatcttttacaaagcttacgaatttgattacaaatgttcttctaaatgccattatcttcccatccggtttcttgataagccagcctatgctgaagccccagccattgctagatacccaccaccgatagctgggtagcaaactcctggataataaataacagtgatatttaccactgacattctggcatttcagaaattcaatctgtcttcccaatgccttattttaatggtttttacaaaaaaaaaaaaatcatactattactagatggcagaacctaatgtgtgtttggccagcctattttctttaaagccatgctgacaatgattgttaaaactgctcccatgctagaatgctcctcaattgtttccgtcttgacacaaggtcaatggggactagagtaatgaagaaataaagcaaaactgaaacattttaatttggggtctacaagactatattaacttctagcaaattaaatggatgagtggtttgcagccactgacatttatatttcacgattagttctctaggccccttattctctctgcgccattaacctttagggtgtagctctttgtcagtctcacttcaattatgctttcgagggattatagaattagcaattccagttttgatggcacgagctctgtcaaatcagagagacagatgtgagctcatgtaactgagaggcttccatctgttggactgagaactgaaacctggaaaggctcttgtatttcctttcttacgcttccttgggctgttccagcttggaattacccatttacttacatacttggtatttgagcaaatatcttaaatagctgaggtagcaacctttcttgccaaaggtggatggctactcaccatccaccttttagttatggattccaatgctggtgacagaggagaaagtgatgtcacctcatacatatccaaatcctagcatccacaggaacccacacagaatcaaagcccctcactaagttaacaggtcatccactgggatcacatcaaggctctgtcgactggctggaaggaacagaaggaagagcccatggaacagaagcagcaaaggattttattttcagcagagtgaaaattaggtgttgtatactaaagagaaattagtcatcctttggtatatatactcaggggattggttccaggaatcccaccaatggcaaaatccacacatacccaagtctcaaagtccactctgcagagcccgcttataggagaagctgggcctctacacacatgggtttcacatcctgcaatattttctgtctgcaattggttgaaaaaaaatcctgagtcgaagtggaccctcgaagttcagatggtattgttcaagggtcagctgtgtattctttctgtcagggttttctgtaagttgggaatgctgaaaatttctacaactgtctaggtctaactgtctgcaggtgacaaatgtatttctgaaaattagatagtaaattaaacctgatcgtgatttaaaggctctgctgagctcatatgtaaagcaaaagtggttctcagtttaatttcaccaatctgtgaaaattttctttttttttttttgagtcaggatctctgtcacctaggttggagtgcagtggtgccatcataattcattgcagcctcaacctcccaggctcaagtgatcctcccacctcaacctcccgagcagctgggactacaagtgccctccaccacgcttggttaattttttgtattttttgtagagatggggttttaccatgttgcccaggctggtctcgaactcctgggctcaagtgatcctcccacctctgtctcccaaagtgctgggattacaggcatgagccacagcaccggggcaaattttccttattgtttttcatccagccactcctatttcatgtctagtacaatgctttccaaagtgagttcctggatgacctacgtcagaatcacctaaaagacttatttaaaacacatattcctaggtctggctccagtcctaataaaaagttgtccagggacccccacgatatgtcattttagcgtgccccaagaggtgtctcttctcatgcctcttccactttcacaactgatcaataccaagatcagccaacaccacatcagacatttctaaggacgtgtcagcagtgacgtggcacatgggagaactgatgatgtatctcagtactcacatccactcaggaaatgcctgatgaacgagtttcagaaagcaagatttaggccgtcctggttacctcctgccagcactaacacgtgaaacagctcaagaccagctttaggagggctcacctctattttcaaataatgacgtctttctctaattttttttttaatgtttgcctcttgagagatcagggacttcattaagtaaccctcccatgcctcagtttccccatatggaaaatagctatactatctgctgccttctattcctataaggcatacagtcatatacttcctatttgtcttttgcacaacaaaacaactcattccccaaaagctttgaattaggcttgcaaacatagtccttaactaccaaactgtaaatttctcaaagtctagaaaaatgagaggggcaaggaaagaaacaaaaagaaacttaggcttaactgtaccagctagtctcaacttgatccgaaggaacactgctagcattctctcagctagcttctcacgattacatttaaaaccaccacaaagccaccacgatcacgctctgagaggccgccgcaggtaaacagagggatagggtaggaacagcccagcataactgacaatgctctttaggggatctgcagatctgccttctcaaacatctcatttcacttcatgaatatttacaaaatatttgcaaaagaagaactaaggcaatgaacatgtccagaaagaaccacatgctaacttctaaaggtttctctctccaaaaattcagtagtgccagaggcctgttcttttgtcccaggttgtttttcaagtgctacctcatgacagaatggatcactcataataactagatgttagcatctgtgtcacataattcatctctggcagtccacttcttttaaatcctaatagtaggcctcctaaataggattgctagcatttggcatctcatttgcctctatgacaacaaaactctagaagacgtagtttataatacattatggtttcagctgaatgacatttggttctaaggtctttgaaagtacaagtttgaaaatgccaaattttatctatatccatatctatagctccatctgaaattagacagattaccaaacagaaaatgtcactcagattctaaaaataaaccatgctattgctccagacaggttacaccagagggttaggaccatgacattttgctggggttcaagtgcaaatcagcaaacaaaatggcatgtttttctcttcctttttcacagctaaagattagtgaaggcagcattgtagtctgtgtaactgctcaacccaacctttatccaggagctagtattgcttctttaaaaacattttttttttttgtaaataaaatgtggtacagccatacaaggaactactactcagcaataaaaaggaatgaagtaacaaaagaccaaatattgtattattccatttatatgaaatgcccagaataagcagatctatatagacagaaagtagatctgtggctgccagggaccagcaggacgggggaatggagagtgaaacgggtcaaggtttcttccgggagtgatgaaaatgttctaaactttgatcccagtgataactgtacaactctgtgaatatattaaataccattaaattgtataatttaaacgaatgaatggcatggtgtacgaattatatctcagcaaagctgttaaaaatcttaacttaaagaaactatcatcttttaaaagctatagcagaaagagagccagcactggagagagtaaatatggtggcttttcacctttccaagaatctcaatgagccctgggcattgcaaaaattagtcaagcaactgtcacaactgcagtggtaaccaaatacggaagctgaatcaaatacggaaaggaaattcttttgaactcaaagacacaacctttccaaaaaaatacactgcaagcacacaaacagaccacacaaagtcaaaacaaaacaagtacctgtgtgggtggaaatgtatccaagtgccactcttttcttcaagtctttcattctcctcttattacttcaaagataagccctggatgggcaggaactaagttgttttggttttttctcatgacacaaaagatctggcagagctggagatttcattaccttgaaaggcagtaatatttgaaggtaccatgactattccctgaacagtgctctaaacacattgtggtggctaagagctatggttatcccacctcttcaatgagaatggggcattcattctacagaaagccacttacagacaaaatgggtatcacatcatccataaaatgaagtaaagaacagttggctgaaacttcccaaacagcccgttactccatgtgatataaatgggtttgcaaagctcaacaaaggaagacaagcactaggaaggcaaagccagtcttcctagcatgataaccaaaagtgtctcagccctctaaagagctctaggatctcaaatcatgtgcacaatacagagaagtgctaatggtggaagggatgcacaagagatggtagatgtcttgccctcaaggaattcatattttagatagggtggctgggggtgggggtggggggcagtgaaactggattattttttggcaaacatgcaaacgagtgttatcacttaaatgtagtcatactagaatgacttgaccctattccaaataaaattgccactgattaaaagacacttgcaaactccacttgtggaactggcttcagaatgacagagaaaaaactagctcttcactttataggcatacttatgtataagtatggcaaggagtaagcactgtgtttgttttatacacacacacacacacacacacacacacactctctctctctctctctctgtcggtttttaaattactggccactggtgagaaaaccatcaatgtgtccaggcgcagtggctcacatctgtaatcccagcactttgggaggccgaggcagttggatcatctaaggtcaggagttcgagaccagcctggccaacatggtgaaaccccgtctctactaaaaaaaaagaaaaattagctgggcgtgggttagccgggcgtggtggcaggcgcctgtaatcccagctacccaggaggctgagggaagtgaatcgcttgaacccaggaggcagaggttccagtgagccaagatcgtgccattgcactccagcctgagtgacaagagtgaaacttcatctcaaaaaaaaaaaaaaaaaaaaaaatcaatgttctgagaataagatcatcgcagtattacgttaaatgtgtaattttccaaggtaactattacttatttagatgtgtaggttgttacatttgtttgcttttcatcagtcacatttacattaaagacaataaaatacaaagtgatataactgccaaatgtatattacagactataaactcaacagaaattcaaaagaggatgatataaacatatcacacattgaaagaggacaaagcatcttgctaggcactgacattttaaaaggttaaagtacaaaagttactttagataggaggaataaattctgctgctctagtgcataggaggattactatggttaacagtaaaagattgcatattctaaaatagctacatgagaggcttctgaaggccctcacaacaaataaatgataaggtaatgaatacaagaactacactgactggatcattatacaacataaatatgtattaaaacatcaaattggcccagcatggtggctcatgcctataatcccagcactttgggaggccaaggtgggcagatcacctgagttcgggaattcgagaccagcctgaccaacatggagaaaccccatctctactaaaaatacaaaattagccaagcatggtggtgcatgcctgtgattccagctacttgggaggctgaagcaggagaatggcttgaacccgggaggcagaggttgcggtaaaccgagatcgtgccattgcaagccagcctgggcaacaagagtgaaactccgtctcaaaaaacaaaaaaaaaaaagaaaagaaacatcgaattgtaccctaaaaatagatacaatgtgttgactaaaaaataaaatttatcaaaaaaagtttaaatgttttcccaaatatgaaaaattaataagcatttaaaaattaatcaatctcggccgggcgcggtggctcacgcctgtaatcccagcactttgggaggccaaggcgggcggatcacgaggtcaggagattgagaccatcctagctaacacggtgaaaccccgtctctactaaaaatacaaacatttagccgggcgtggtggcgggcgcctgtaatcccagctattctggaggctgaggcagaagaatggtgtgaacacgggaggcagagcttgcagtgagcagagatcgcaccacttcactccagcctgagtgacagagcgagactctgtctcaaacaaaaacaaaaacaaaaaaatcaatctcactgctaataactttaaatttaaatatgagatactactttggaccaaacaattgccaaagattttggggaaagcatgctgattagcatgcagtaaaataggcacttccataatctattaagacctttcaaatataggaaatatccttaatgaccaactacagagaggtgtttgcataaatgatgccatagctataggaaaaataagtagacattaatgattttttgtagaatttcaaaaccaaagccaattttcacaatactgaatgaaataaaattcagaatataaaattttaaacacactatgattttggttgtgttaaattatatacactcaggagaaaagactgaaatcaatagtgcaatatggttgtttctggggtgtagccaatcttttcctattctttatacatgcctgtgtttttaaaagattctacaattctctatatttctttggtattcaaaaataaaagcagacaataagaagaaatattcttcccaaaacatgtagattgaaaaaaaaaaaaggttaaggtccaattcctgcctataagatcttccaggtaaaatttcataaaacgaggttgggccacaccttgaaagatacatagaatccacatagctggggctggaactgggggctcacacctgtaatcccagcactttgggaggcagaggcaggtggatcacctgaggtcaggagttcaagaccagcctggccaacacagtgaaactaaaaacacataaaattagccagttgtggtggcaagcgcctgtaatcccacctactcgggaggctgaggtaggagaatcacttgaacccgggaggcagaggcggaggttgcagtgagatgagatcgctgcactccagcctgggctacagagcgagacgggtctcaaaaaaaaaaaaaaaaaaaaagaatccacgtagctggaaaggagtagaaagggcattccaaatgggagaaaaaactcaaagaatctaaagagggaatagttggcaaaccagaagataaatcaaattggagttacgagagcttaatccttgagctttattttaacaggccagtggttggatgaatcactaccaaataagaaataaagcaaagctatactaagctaaaggaaagtgttctcaaaaaagagtcttctgtgccacgttggtgttttttcacatccctctatctggctgcctgctggtttccatggcttagatttacccatttggaaaaacaacccctcccctgacaataccaaaatcactacctctgccatgaaattaggcaagaaatatacatactccagcctctaatttagacaataaacttgccaaaagtacggaatatatctttttttcacatagtaccaatcaacagtgtcataataggcattccaataagtaatgaattacaagttaacaatgagcaacaccttaatattgtccataaatccccaccagaactgaaattttacaagttggcaatatcaattattggtaaagatttagagttcctggccgggcgtggtggctcacacctgtaaccccagcactttgggaggccgaggcaggtggatcacctgaggtcaggacttcgaaaccagcctgtccaacatggtgtgaccctggctctactaaacacacaaaaaattagatgggcgtggtggcgggcgcctgtaatcccagctactggggagggtgagagaggagaatcacttgaacccaggaggcggaggttgcagtgagccaagatcacgccactacactccagcctggacaacaagagtgaaactccgtctcaaaaataaaaaataaaaaaataaataaagatgtagagttcctgaaatgcttatacactgctggtagaagagtaagatgctataaccactttggaaaacagttgtgcagttgcttaaaaagttaaacgtacccaataatccggcaattctactaagtatttacccaaaagaaatgaccacatatgtccacaaaaagcttgcataaaaatgttcgaacactgtacaacaaagtgtacctcttaaaatggttaaaataatacgttttatgttatatatatacttggccacagaataaacaattctgagcaagttcattcattatagttgaaaaccggaaacttaaaacatcatccatcaagtttagaagagatgagcaaattgtggtatacgcataagacgacaatgccaaagaacaaactactccaggagcatgcatgaatctcagaaacactacgttaggcacaagaagctggatccaaattactttatacgacgttcaagaccaggccaacctaatatataactgcagaagccaaaacagtggttctctttgggggatgtgcgtactgactggtaaggaagctcgaggaggctcaggggcgatgagaatgctctccctcttgatctgggtagtcagccccaatcaaaaagactattaacaataaatacagaataatggaggccaaagtttagacagcccaaggccaaccactcataaccaaaacttaagtcatcctgatttccccaaacactaaacctaaatataaaagaaacacaaatctgagttttttgtccttatcagcagataaggacaaaaataaggtttgataaggatcaaacccatcaactaacaacaaatcagcttaaacagctgtctgccttaaggatctatacatgacagccattcatgaaaaaggtcaggtcattcctcctttatgctctaaactgcaccgtaactgctataaagtaagactgtgacatttttgggtttgaggtctcccagtccatgaactctcctcttgtatgtatgagaaacacttaaaattctaacttgatctaattttatgtttgacaaaacatggggggaaaaatttacaaagctatacccttaggagttcatcataattaattatgcctcaataaaaataaaggaagaaagaaaacagaacaagtggaaaatcccagtccattatcccaattaagccccaggtttgcattttatctagccctcacgaagtactccactatcatgaggtcagagctcatcatcagaaatccccctcggagtgctgtagtgtctgtcctattcaaggcagcgttaggtctgaccacagtattttcagaacatacaactaatccatcaatttcttaagccttttaaaattcactgaacttggccgtgcgcagtggctcacacctgtcatcccagcactttgggcaggcagatcgcctgaggtcaggagttcaattccagcccagacaacacagtaaaaccctgccttactaaaaatacaaaaattagccgtgtgtaatggcacgcacctgtagtcccagctacttgggaggctgaggcgggagaatggcttgaacccaggaggcagaggttgcaatgagctgagatcgtgccactgcactccagcctgggtgacagagcaacactctgtctcaaaaataaaaaaaaaataaaataaaattcactgaatttaaaagttctacatatatttcattcctattaagacccaagacgaaccatttcatctttctttttaaaaaaggctaataatgcttcaataaatgctagttcccagtatagtgacagatacaatggagtgaggcagtctgactctggccatagttaacagatcaaggaaaaaaatcccacactcctaagattccaaagaaattttctgcaagtttccttaatgtactttaaaatccttcagaagaccatggggaaaataaatcatcctctcaaattcatattctgaagtttgaaaataaaagcagttccttttcatgtttggatatagtcactctgaacagtaaatcagctaacagacatcaacctggcataagactcttcataacctgtaattatcttctttatttccctgttgctcatctgtctcccctgctagaacatacactccataaagtcagggatcttgctgtctgttttgctagcagccatatccccagcacataaaacagttcctggcacataatgggtattaaatattttcccatcagtgatcagttcgtttagcagactgtccaaagtcaagtaactagaaagcaagacgaacaagggcagctatctgtaatcaagcagccaacttcaaatgttttcctacagaagctaagtcctaaagagtttttcttctctctcttcccctcttattaatattcctccttttcccagctatctttcctgcctctaagaacagtattctaagaattaagaaactcacttgtatcaccaactcgctgagtatccttgggctagtcaggcaatttcaatgcttatctttagtcaaaagacactggagtcattcataaggagacaacacttgcctggtgtgaagaacgagtagctgcaagacaaaatcctagccctcccagaaattagagtaagccagacagaggagggaggtaacacagcgagataaattccatggcagaagtatgcacagcatgccatgaaaatacaaacacctaatccctccaagaaggcagaggagggccaggagcggtggctcacacctgtaatcccagcactttgggaggccaaggcgggcaagatcacgaggtcaagagatcaagaccatcctggccaacactgtgaaaccccgtctctactaaaaatacaaaaaaattagctgggtgtggtggcacgcacctgtagtcccagctactcaggaggctgaggcagaagaatcgcttgaacctggaaggcggaggttgcagtgagccgagatcgcaccactgcactccagcctggcgacagagcaagacaccgtctcaaaaaaacaaaaaaaagatgaagaaaagaaggcagaggagaggagggtcactttccagaagaagcccttgcccttgagggactaataggagccacgagaaaggaacagggagatttcagatagaggcaaaagggcttactcacaggaagcagtttcacgttatgtggactgcagggtgtgagcgaacatggaaagtaaggctgaagaggtaagccggaatgatattctggtaatattacagatgtaaacctagaagaagatgagattagaggcagggagcagtttagagattattttagcaattaacaggaaaattaatggagacctcgtaagagaggagttcccaggacctcttcaacctattccaccctttgccccaggtgaccacgctcactcaaagcttcaagtattctctatccaagtatctccagcagcagcctctcctgagctctagaaccatatacccaactttctattatttatctcttcttcgaaatctcagagcctttaaactcaacgcagccgaagctaagcctatgagctcaccccagaacctagtcctcttcctgtgtttcctgtctctgcagatggcagcaccacccatccgcttgtaggagctggaaacctgggaggcacccttagtgtctcctacgtcctctccctcatccgctgttcaatccatcaccaatccctgccaggctcctcccctaaggatctcatacgtctatccactgctttcctctgtggccaccgtcagaatttgccttacccctatctcttgcctaagccagtgcaccaggttcacatcctctcctattactatttcatctcttattcccttccagtccattctcaaactgtgacaaaagtttgtttttagtgctcatcagcctgcgtcacccttttatgcccgcctactcaccccgaggagctccatcaagcccctcttcactggtgttgctcaccatatgtgcaccagcaccttatttctgaaggaatgaggactcaggttttttttttttcttttgagaccgagtctcactctgttgcccaggccagagtgcggtgggatgatattggctcactgcaaccgccgcctcccaggttcaagtgattctcctgcctcaccctcccgagtatctgggatcgcgcaccagcatgcctggctaatttttatatttttagtagaggcggcgtttcaccacattggccaggcaggtctcaaactcctgagctcaagcaatctgcctgcctcagtctcccaaagtgctgggattacaggcgtgagcaaccgcccctggccaggactcagtatttgagcaaagggaggcaagaattttaagaatttgtaaaaagtcagtattgcatggcataaagagactaaggtaaagactaaaaaagactgaacttgccactaggatatcatttagtgaccgtgtctggaacaaattcaacagagttgtgggagcagaaatcagaggacagcagattaagagggaaagggcagaaagggagtagaggtgagctggccttcttccaataacgtggatggcaaggacgatacagtctaatggctggaacaaacacaagatttagggaagggtttgtttttgttttaaagttgggagagacttgtataggagcacatgatgaagggaaagaagcaggagaggaagaggagggtatcagaacagaaagagatctgtgagcaccaacagaacaatctgccttcatttcccctgaaggaaggaacatgaatggtgatgaattcagaagagcttgcaggcagggaagcaacatgtggttcttttattttctctaagatatagagcagattcttccagctccacaagaaggtcctctcccactcactctctctttattggacaaaatatagaaccaaatactgtatgcactgtatcaaacaccaagagcgcaatgcttgatgtccactgtgagttctggaactttaccttgttccctaccagtatcagccctcttttattggtatgaagcctctaatagaaaaaagcctcccagcctggtctccagaaactggtgttaactgctccgaattttgaattcagcagagctgtgctagaaaactgcacataaggtttatactgagaatgacagctattttccattccctttactttctagtcggtagaacttaaagcctggcacagctgctattacatattccttaaacagcgaaccagatcattctcgtgggtgattttaagcattagagaagaggtcataacttttcagcaggaaaataaaacaaaggttctttctggggtcagccaatagtttatcagtggctcatcagaaaaacaatagtttaaaaggacttgcgtagttaagaatggaagaacatgggtaaagaaaaaaactgctgacattaaaatagaattttaaattaatctcttgtcgcgttaatagtactgccatataatggaagatgcatttattttctaaggggaaaatgtccagaaacttgcactcatcactcccttaactgttatcagggaagaagtgtagagtctcccagctggattatgggtagtgtaaacatctttgctaaattgcttggcagagtacatctgcatcaaaccattagagtctggaattcactctattaaaatcaaatcattagccaagaagaattaacaggaaactattttcatgcaaaacagatataaaataaaaatcaagagcaatacatgagtaattctttttcattcacaattttagatggtgcataatgcagagtattgttttagaaacgtgctgctctctaacagccatctctatacaatatagggtattgtttggatactggagcaatttaagctttttctatgtatccaaaagtccctggattaagatccaaagaaacctggcacagcaacaaagttgacttgtaacacatctcagcctttaagcaaattgtttattaatgcagcaggaaagtcgctgttcaggccctaagtaagctatgtatctccggaagtgtcccccatgttgcattctccaaaactgtgcagaattttctcctagttttccattacaccaaggatggtgggagggcttcaacaggtgatgaagaatgtgaacaaaatactaactgaaaaaaaagttcttcccaaagtatcaccaactctgtttaataaacagtggagctacagatgaatgagaagggaagctgggacatatattatctgtatataatgtctgtatatcccacagccaagagttctcacactcaaagagacgctggcttcacatggagaaaacaacctctcaggatgtgtgcactactttaaaagatctcacaaaaaagatacaaaagaaggcatacaggcatctccctatacagggtaaaaaaaaaaaaaaagctagaatttgtttagaattagacacatggtagtaaaggtataaagaaaagcaagttacaactgtggtgaactcttggggctgggagggatctgatcaaaagataatacctggaaggggcgatttactatttcttgacctggccatagtcaccgggttgttcatttctctaaccataaaatacacatttttatacacttttctgtatgtatatttcattataaaacatgttgagagatcgatccctaatacatttcttagtagagtataggcattccataaatgtttaataacagaatggataacaaaatggtactagtactaagttttctctaatcacttactagatatatttcagtttgtcatgtttacagacttctttgcaaacaaaagagtgaaatattaagagtttggaacgatcctatgcatagcaacacattaaagaggacttttaagaatagattctctatttcatttagagtaaataaacattctttcaactagtcatgattcacattgataggattaaaacattctatacataataccttgaaattaaaacaatcaacagaattaaacaacaatgcagaaaaggcaagacagcaaagcaaagtgacaaaaataattccttcgaacttacagaacatgtaacattcagaaaggaaaggagagcaaatgaagaaagcaaaatcattttcaggtcctgcttttaaaaataagcaaccacggttaggattttgttgtggagttggggggtgggaaatgacacatgagttcattaaaaaataaaagacggagagaaaactgttttggaatacaatgcagagcaagtcttaaaaaacagttgccatgagcttcaatgtgcaataataaataccactaaatagaaaccgccactgaataaacgtcagatactttgagatgacaaagatcgccagaaacattccctggtccgactgtttttatatatttgtgtacatgcgtaagtgctaaatctggatctaatttcttcctgaaaaaatccagttttctgcaacatcctcacagtcagggagaactaagctatattgagaagtttggaatctcctcacgtgccaaggaggattgctttctatctttaccgcatgttttaaaaaatcttcacagcaacacatccaggcaccctaggaatacaaggccacgcagacaatagggaacggaggaaggagggaggaagacaaacctggcctccagaaggagccaagtgtaggctccaagagataaacagccaagtacaataatctttcgagaagcgggctgagaaacaagggtgggagctggaaggaagggtataatcacaccttccttcacaaactgtaattaggagaaagacaccagccaggccagctctctcgcagagctcctgggctcacctgggcatgttttactaaccaagctcctcctagtttctttctctctctctctgtctcccccttcctccctaacccccactggcccccactccctatcctttcctgcaagtaaaaagctaaagtaaaatgactttccacagcaaaacagttacagatgttctacctcggaatacatcccagatcaagagctcgtcacttgatatgcagggctggggaccaggagagggtacgaaatggccctgcgctgtggccttttcacctacccaagcctcctaagtttcctgaaggttctgagctcattagacaaagaacaatgaagccaggactccactcaaccgctggtggttagactggtggaaaacaaaagatcacagggtctcactgaactcagcaactctccagtgtgcgtcttcccttccattccagaaaattaatttaaaagttgcccgtgatgaaacaagggataactgtgcctaaaacaatgaaccgttctaaagcttgaagtcggaataattcgctcttaagctttgagaggatcacactatgcaatgtattcctactttctcccaatataaatcacgctattaaattaaaaggagagaattcttccaccaaattacacactaatggctcttaacccataattaaagtatcgctaccagcagtgtaaagccccagccagccagggctcagacccaggtctcagccccagggatgatgtcagtgcagcgacagcgatcttgaggaaagcccgtggtctaacctgtccctgtccctgctccctggggactggctctggagctggcatccacgcaggcctcctcctctgcacaggcagacaaaaggaaagcaagcccagtgccagagcagcacgaagagcaccttccagcgaggccggtcactcagaggtgtctcacctaccctttccccaacatcacaacagcctcggaatttggaccagcaactggcttcagagcaaggagaagtgggagaggctccactgtgtgctgtaatccagggtgttatccccgtgctaggccgtgagggcacccaggacggggcatgaccctaacatcacggagctaatgaggagataagacatgaaataagcccggcgcggtggctcacacctgtaatcccagcactttggaaggccaaggcgggcggattacctgagatcaggagtttgagaccagcctggccaacatggtgaaaccctacctctaccaaaaatacaaaaattagctggtcatggtgcagggcacctactgtaatcccagctactagtgaggctgaggcaggaaaatcacttgaacccgggaggcagaggttgcagtgagtggagatggcgccactgcactctagtctgggcgacagagcaagactccgtctcaaaagaaaaaaaaaagacatgaaataattctggagaggcagcacggcatagaagattcatagaagagtcaaaactcaattcaatcctgccacaaactttctaaataaactaaatcaactctctgaaaaacagagtttccctctctgagcctcactttccttggtgaaaacaaggcaaaggtattagatgatgtctgaggccctggatagctctgcaataattagatagagaatacaaggcagtatataatcaagtattaaattatacaggagcaactacagctgccattgagagcttgcactgatttttttttgagtcagccttcattctaaaccacttcctgaaagcccactcagaccctgtgctaggattcagggatgcagcggtcaccaagacagaatgctctgccttcacgaggctttcgccagtctagtaaggtattctcaggtgttcagaggagggaaaaaatgagggctggggttggcctatgacctttgcatggagacagaggcaaaactgggcttcaagtgggtatcatctgagcattcagtggggtgatggacgcagtggttaattgctgagtacggtagtaataagccatgaggttctgaacacatagcacaagcccagttctactaatccgctcatcattagtgaagggaattagttagcttccagaagtcagccagacttcgattcttccggccctctccctaacgtctccttctcccaccccaaacctgctaattgtggttaactttttccctttattcttttcagttattcttgcagacaactatggtggagggcaggagccaggaagcagttaccaaggagggagtccacatctaagcaatatggagtcagtcaggaaggaagaccttgtatgctacaaggtaaacggctaaaaagatcgatttgcgtattaagtcacaagagaggtttaagaaagacagtacaggctgagtgcggtggctcatgcctgtaatcccagcactttgggaggctgaggtgggtggatcacctgaggtcaggagtttgaaaccagcctgcccaacatggtgaaacccatctctattaaaaatacaaaaatgggccgggcatggtggcaggcacctgtaatcccagctactcaggaggctgtggcaggagaatggcttgaacccgggaggcagaggttgcagtgagccaagatcgcgccattgcactccagcctgggggacaagagcgagacttcatcaccaaaaaaaaaaaaaaaaaaaagaccagacacatggtttattttagagtagagctatgtctcatacaactaaggaatatggtataatttagctggtaagaataattaaccatccgcatcttaatttttaaaactaaaatgtcataaaattaatttgtcccttattcttaaggggcatgaaacttgactgtgccctaaatgaaatcaaatgttgcctaccaacagtacattccattttccaaacaacttccctggaatgctggggagctgatatgtttaaaacgaatattctccaagtccaagtgttggattttaaagaaccataacctttccaacttttcctacaaaaaaatcccgtgtgtgatttatgcccatcttcaaaacaccctctggagttcagaccagatgtgtgcagtgtttacactgagaaaaccactaggacatcaacaattcactataaacaccactcaaattttgctgtgctttccttcatttcctctgtatttattctggtgttaaaataatgttaactctcataataaggaaaataggagcagatgtttaaaccaaacagacttcagcccattatcccatatagctactcaatcttcaaaatcaaagtttcttcctcccaaataccgagagagaagagcagagcagagcactctagtttcctgggtgttgcatgctacacaacaactcgacctgggctcgctgtccgtaagttggtcctcaccaatcggagacaggaaaaactaatctggtatcaatttcctaacaatcttatatttctctcttaggccattatgttttgtttttaaaatatcgtattacttgttggcaaagacaatacaacagaaattgcctcagaagtttttctttcttgttgggggaagcggggatggttaaaaaaaaaaaaaacaagaaaaacaaaaccctgactacaatgtgtgaatgtcacgggaaacaagcccagcaatggctgcttacggctttctaaagtcggctgccttttttaagtgagttcagaagcaagatgttacttaacacatcagatgcaaagaaagaaattcacgaaaattctcatagcaggaactagtaggagtaaagaaaaacaaatactctttttaaaaaacgttaaatatgagatcctcatccatagagttttaaaaaacaacgtgaatgagggttgttgttgttttttttccttgaaggggaaaaatactcttgaaagggtgagttttcaactgattaggaaacaggcctgaagtttttagattaaaaaaatacaagtgaatcaccctcccaagtttttgtaactgttttctttttcaagagaaatgtcccgtgtattattggagaaaaaatggaaactgctcctgctgaatgagaaagagaagagtcccggatgtgtgtgtggttacaacagaaaacactcttcctgccaggccgaactcccccggagatgccctcggcggcagacccagggccattgccactttttcaaatcgcacgtagaggatgtccgagggcttaagaaatagatttttctctgactgctaccagagacagttggaaatacaagacagtgggggaagcacctcgcgggcagtaggaggtaataaataacagttcggcgcggctctctctttttcagggcaggctgggggtcggggtgttgtgtaatcgctcccacagggagcggagcgcgaggaacaccccccagtgtcagcgctccccgggctgcacaggaagcgccagcgagacaaagagcccgcctgtgctcgctgacacggtgcccttccggccccacgcgggagagggacattctccgctgtttgggacgctcactcgcgagcacaaaaactcgctgtaactttggctccccctccgtgagctgcagggcgccgtggcccacagcagggtacagtagacggtgcaatccttaccagcccctcccccaaagaggctcaacttttaccggcgtcctacaagtccttcccctaaagacaatattaacggaaatcaaaaatacatacattttaaagagttaaaaatgtgaggcgcgagtacgttgcaagcaacgagcaaactttgaagggtttctacttcactgcctccccgtccagccccctccaccgccccccgcagcctgagatccgaacacactcggtgccgaaccgaacctaagaaacgccggcctttcaagtgccctacaccccggaggaggacagcgggcgcttagaaggcaggcacccagcacactgaggaggagtggccgggacgagcaacgggcagtaattctacaacgggacatctaccttcgtagcacagaatgccgatattgttgttcatcttgtccaagtactgatagttcaacaggtccatcttcataaatagcatttattgggctagcaaagaaaaccagctctttgcttttgccccaaaagagttaagtttcaaaaatcaattgttgctgagtagctcctggctcttcaacttcacaaaggcagaggcccagcctcagactatcaaaacaaagtatgcaaaagttaaaaaaaaaaaaatcaggcacaaaaaaatcgagctcacacgaaacccttcaagggcttactggtagacggtgtatgtactgtatccccgatcgagtatgaaaacagcgtttcagaagtccttacaagtccttcctggaaatggaaaagagtgaaaaagagaaacgcgcagcccgtttcctaggacaaagcggcgccggcccctctcacagcccgctgcaagccggcagcgctgacatgagggctatgcttggcatgactcctatgccgccgcttcctcttcccgcaggaggccgagcatgctcactgcgccgcgctgccgaggcagggagggcttctgcacaggatcagcctctcaatgtagcaagtgttggaaagaaagagaaaggggagggggagagactctagagacggggccttggcagagtggctcttgacaggaagcagccaagccgctgcaaaaccgtaggaggaaaaaagaaaacccaggaagtttctttttcaggagctaagtacaaagtaaaaaatccatcatggaagcaaactcccatggaatgcaactttcgtgaaacttcatgttggggtttcggaaacccaaagtgctagtgatgcataagccatatatatatatatagtgtctttgtttcttttaaagattgttttataatatccatttacactttaactggatatttaaatttctgatgttaatgttacatatagcttcttccataatccccataacaactgagatggacagggcaaggagggtatcaccctttcacagcagaggaaacaggttcagatggattaaatgactggcccacagcccccaaaatagttgacagaactacttttaaagtgttttttcccacctaatgttataattttatttaaaaaaacgagggggccgggtgtagtggctcacacctgtaatcctagtcgaagcaggcggatcacttgaggtcaagagttcaagaccagcctggccagcatggtgaaaccccatctctactaaaaatacataaattagcctggtgtggtagcgcacgcctgtagtcccagctactcaggaggctgaggtgggagaattgcttgaacctgagaggaggaggatgcagtgagccaagatcgtgacactgcactccagcctgggcaacagagtgagactttgtctcaaaaaaaaaaaaaaaaaagaaaagaaaaaaaggagacaaggagaggagaagagatggaagagtgtttaagcaaatagggctataatatcaaaaattaaaagtgtacttgaaattatagagggaaagggtaaaattattttcatttggcatgtatgtcacccacctgtgtgtaagaagctagtggcatgcagctgtactatttgctattggaagaacttggggcttaaactttgattacccagtgcctagcacaaccaagttcaggtgcccaaaaactgtttactgaacgagtgaaccactgaatgttcagttttcagcacatcaagaacgtgttaacaaaatagaaaaaaaaaaaacaaaaactaaacatttgaattactattctaaaaatatatttttaatattccaaaataatatttgaataaataatttgaaggagttgtatgttaaaaatccagcaataggccaggcgcggtggctcacgcctgtaatcccagcactttgggaggccgaggcgggtggatcatgaggtcaggagatcgagaccatcctggctaacacggtgaaaccccgtctctactaaaaatacagaaaattagccgggcgcggtggcgggcgcctgtagtcccagctactcgggaggctgaggcaggagaatggcgtgaacccgggaagcggagcttgcagtgagccaagattgcgccactgcagtctgcagtccgcagtccggcctgggcgacagagcgagactccgtctcaaaaaaaaaaaaaaatccagcaatagttgcattgggtttattaggcacactcatggcaaggtgttctaatgaaatcttacttgggagtccggatgcggtggctcacgcgtgtaatcccagcactctgggagactgagacgggcggatcacttgaggtcaggagtttgagaacagtctggccaacatggtgaaaccctgtctctactaaaaatacaaaaattagccgggcatagtggcatgtgtctgtaatcccagctactagggaggctgaggcaggagaattgtttgaacacgggaggcagaggctgcagtgagccaagattgtgccactgcactccagcctgggtgacagaacaagactccgtctcaaaaaacaaaacaaaacaaaaaaactatatgacatctaaatactaaatactgttgccgtcattgctgcaacagtaatcactggggtgacatcaggggaagtaagtaataggggaatcaagatttcacaagctttcatttataagaatatttattgacactatattacatgtaataagctatagtgaaagatatgtatcctatcaattgtaattaaaatacttaatggtatttggtggggagggttgaagaaaactcaaaactcgtaacatccagtatacatgagatcattgcactgaaaacaaacaatatcaggtatcagatttaaatttaactgatagttttggagtactcttactgtgctacgtttttacataaattctcaatcagaaaactttatccatcattgtcccacatggaagagaggtggctgcacattagaaccaggggggagcttttaaaaatcttgctgctgaggttgcatccccaactcatctgaggtgggaaccagcagcagtagcttctaaagtcccaggtgattccaatatgcagtcaaggttgagaaccattgctttcatctagggaggaaaaaaaaaaaaaccctgccttaagatatttcattttattcacttattttgacatgaagaatttttttaatagtaatttaagcaaatgattcaaacaataccattgtagaaaatgaataaaatatttggtaacgtcccttaagggactcagcatcacttagaacagcagttctcagcctccgggtggcaaccattttcgtggacaccgtctcacaggtctaccttgactattgtaacattcccagccacagccaccacgtctttcccgctgatccgggaggctagcacggtgctacccaagtgtgatccagaggggttcgagcaccaggtgttcctagtccccaaaagctagatacagaaacggagaatgaacatttaaaacttttatagcaattcgatagactaattttatgtctctcaaatcttaatattaaagaaatttgagggctgtagttttcgtatttctagttatagggctgcattacattttataaactatcagtctgcaacaaagtcttggggaaaaatgaaacaaacctggtttcacagagaagcttgtgctccagaggggccagctacaacagcccgcctctgcaggctgggagcgcctcctggaccggctctaggcctttccatcccagctcctgacaactttcaccttagtttcaagcacactggatgacctgcagtgagttattccacaaagcacatcagtatgcttctcggtgtgcaggacgtctcttctttcccaacctgtctactcagcaaacatccactcttccttgagacttgtcagaaagcccctcttgtcctgtgaaatctccctacgatcccatcctaccatctcctcacaccctacgccaagctatccttttacagggtaagtagtccttatccaaaatacttggaccagaagtgttttggatttcggaccttcttggattttggaatagttgcattatacttaccagttgagcatctctaattttaaagtctgaaatctgaaatgctccaatatgagcattttcacctgaatgttgtgtcagcactcaacactgttcagattttggagcatttttcatttcagatttttggattaggacgctcaacccataccttatatgtgcttctttcctagcctagatcttcggagcaaggactatgccttcctcaccttttcgaggtcagtctggcagaagtctggcagaagcctggcgcatggtaggccatcaataaataccagctgaataaaatcagtaaacatctaaacggcagattcttcatttccccatccctacttccagcacactctggattatcttactcgatgtcattaggtggctgtcaacatctcttggagaccacaggtccttgcctttaagaaacaccatgtagattctgattgtacttcagggtacaatcagctcatccataaaaaaaaaaaaatactagaaaatatcaatccttctcagattcattcataggataatatattcataattaaagtagcaacaggatagttttgtagggaattggaaagatgggtctaaattttatccacacacacaaatgagatgggaaaagctagttctttttctacgaatgaataagtttgatctatcaaatatttaaaacataaagcaaagaatatattttggagtgttactgggtagagactaggtaggaccagacagatactgtggatataggaatcagaaatccaggccaatggggaagaagtggattacaaaacaaacattactgagaaaagaatccagatagcactttgccttatactgtacatcaaaataaatcccaaatgttttaaagattatttagatgcttttaaagtaaggtttttgctgcaaaaacttacaaaactataaggatatgttcagactatctgatgtggaataggaaaacatttgctaagccagaaataaaatttttaatcaaagacagaagccaccaaggaagatgtagaatttgattgagaatacagattttatgcttttatacatctaaaaacaccaaaaccaagtaaaggcaaaatacaaaactgaagaatatatttgtgtcatatattacagtgaaggataaatgttcttggtattcaaagaacatttaaaaatagaaagaacaaaggaaaaaattgaaaaaccacttgatctgaataacattttttaagagcatgagaaacaaatggccaacacatttttgaaaaactattcaaccttactaataatcaaagaaatataaattttaagtgattttccagctaccaatttaacaaaaagactttttcaatcttatttcttgctggtgaaacaggatgccattggaatctttgctcactgctaatgcagtataaacagataacgcctgtgtataaagcaggttggcacacactagactgttttatgaaaaatgtccatgcctttgtccttgccttggactctacttctagacttctgtcttaagaaaataagatttgaagagtttcataaagatgcttatcatacagctatgtgtaaaatgaaaacctgaaaacctaaagtccaaataaaaggatgcattaaaaccgtggcttatcgatgacagactattacgcagccattacaacaccttcaataatctataatgacatgaggaaatgctatgctatatactgtgtgacagtactacatttgttaactgaaaacaataaaaatcggatataaaactaaaacacacattattcaccaactgtgctaatgtatttatgaaaacatacatatatatataggaaaaagtatacattaaaaagactggaaagtattccaaaatgttaatagtgcccatctttgaatggtgggcattttttccattttcctgaatttctaactagcctacaaatagtttattcttcctataatgaagatgcggataaggaaagttcttgatttttaaaaagcagcaacacaatgaaataatattccctggtgagacataagcaatggatatgtatatcttattatagcttacatatctcatgatatctccttttgatttgggtttaacaacttaaaaataataagaatccaaacatttctttagaactttggaacattcaaagatgtttaagatggggtatctgtctcaaagagcaaaattgacagagacagctctacacttgcagagcttatagacatgtgtacgtgctttttatcttctactgcttactaattatgtcatatgtcagtaccaattcccccaaactagaccataagcttctagagggaaggaaagctaagcctcagtccttagagtaaaactcccccacagcacacaagtgctctatttggtttggtttggtttggtttggtttggtttggtttggtttggtttggtttggtttttttgaaacagggtctccctctattgcccaggctagagtgcagtggctcaatcacagctcactgcagccttgacttcccaggctcaagtgatccttccaactcagcaggaccacaggtgcatgccaccgtgtctggctaacttttttttttaatcattttttgtagagacaggttctcactgtgttacccaggctggtcttgaactcctggccttaagccatccacccgcctcggtctcccaaagtgctgggattactggcatgagccaccacgcctggcccaataagtgctttataaatgttaattatggttgtgcctcagcatctttgtggaataatggcaatatgacgatagaagaaagcccaggctaattactaggctgatctgtttaattagctagaggtttgactaccactttagaatagatcaccaaaactgcgagctgtgtaataaaagccaaatactcttctatttaatatcagcctgtggaaagaaaagccaaatgatcaaaatcactccccagacatttatttaaaataaaatgctttcatttgagcacttgaagagaggggaaagttttaatgttaagtctaacataacatctccaaataccacattagaaaatatgagtaaccctactgcgctatctgtttcccctactgggttccgctgtgctcttcctcccagggtttcaagtaagctggatatttagttaatactttcattttaaagtgctttttttctcttcttgctacacatagaaaacacacacacacacacacacacacacagacacacactttaacctgatgtaaataatattcaaaacagaccttactaataacaagaaaataagtttgactattccttgagctaaagcatcagttaaacaataagttggaggtgcaaaactgtcatgtttcagaggatctctaggtccgtcgcaatttaccagcacattcctcagtgtactaagaacagtaccaatgatgatgatgatggtggtgtttgtaaaacactacactggtcaacacatttttgcttcgtaatctacttaatttaattactaagacaaggttgtaagaaggaaagcatagaaaagggtttaagggaccaggcgcggtggctcacgcctgtaatcccagcactttgggagggcgggtggatcacctgaggtcaggagttcgggaccagcctgactaacatattgaaaacccatctctcctaaatacaaaaaaattagccaagtgtggtggcaggtgcctataatcccagctacttgggaggctgaggcaggagaactgcttgaacccaggaggcggaggttgtattgagccaagattgtaccattgcactccagcctaagcgatagagtgagactcaaaaaaaaaaaaagaaagaaagaaaaagaaagaaaagggtttaaggtaaaacctagcattgagtaataaaaaaggaagacttaagaaaccaaactttcttttcttttaaacattgtttagaatgcaaattccttaaaggcctagctgaattaccaaccccccgcccccaccaagaaccattagctaggattaatctcttcatcctgcattattttaggtttattctatacttcattctaaaacaaagcagactataagatagtttctgtgtctgtcccctaccatattataaagactgctttgtacacggtaggtcaacaactaagctgctgagttaaaggagaaaccaaaacaaaacaaacttcaaatgccttaaatatcaatgacgtacagtaagtaccagggagtagctgatttaaaaaaaaaaaaaatcagcgacataaaccaaatatctaataagctccctttgttgttactttcttttaagaattcctaaatatatcataaaatagtgattatttatacaacttggggctgctcaaggatgatttttttaaaaggacagtattttgtggaatttttcacaaaagcaaatatcattaaactatgtcttagattttattatttacaaaatactaccatttgtaagttaaaacacactcaacttctattaagtagcgactgatcattctctgtaatataagattttaacacaaatctatggacttttcaaaaactttaaatgggtcttcagatcatatttaaattttcaatacaacaccaccctctaggggtgaactttaaattacaaagaccattttgaaaaagcaaactgcagaattcgtgctattcttgcctgatgtgcattatatttcaaatacaaaaataaaccttattttatttaatattaaaattcatagaaaatatcttttaacaaatagtttaattcttactaaactctgcaaaagttaaaacaaaatacaaaatcaattaaattgatgccaagtgattaaataggaaatgtgctttcacataaatttaaccttaataatcctaaaaagtgcagactgggaatggtgttttttgtttttttgtttttttgacatggagtctaactctgttgcccaggctggagtgcagtggcgcgatgtctgctcactggcaacttctgccccccgggttcaagcgattctcctgcctcagcctccaaagtagctgggataacaggcacgtgccaccacgcccgggtaatttttgtatttttattagagatggggtttcaccatgttggacaggttggtctcgaactcctgacctcaagtgatccgcccatctcagcctcccaaagtactgggactacaggctaaggaatggtgttttaaataaatcagaataaatcagtgcgagggaagggaatttaattagattagcatccccaagaaaagagaaatctcttgcaaaacactttaacttgttagttttacaactactgtcttacatgtttgacaatacaaatattttcttgcatgtttacatacatgattattttagtgattttcgctactacaaccaatttaggttcagtaagtcccattcaaagaacattcacaattaaaacgctattctgatattcactttgtaccaagtcataattactcatagatgtattcctgcaagattgactagaactgacttccatggtaaaaatagaagaactggagaaaatgtcccaaatattcaacaactgaagggctaagttcgctgctagccccaatgtgtgacccaacttcatttcacaggtcagtctgcctgcacagtgcttcattcattatgcagcacgctaagcacctccacagtcatccttccaaccagttagggtgccgtccaggaaagagaaatcatggctgttatttatatagggagaattttaatgtatcccacctccacctattccttcttccagtaactacccccatagggtaacttactatcctaacctttaagaacgtagatcagttgtataacactttatagaaagagaatcgtatgatgctagctactcttgtggctggattccttcactccacatattttatgagtggtagcattatttttatgtgcagttgcatagcattcatttgcattgctgtctagtactccattactccaatatatcgcagatccttcattctaccactgatgggcatttaggtagtttctacctgggggttattataaatagtgctgctatgaatattctagtgtgtgtctcttatcagcctcggaatgcatttctgtcgcacatgtactcagaagcagatacgcagaaagtgtatgttcagcttaagtaaatattgccaaatagttttccacagcagttgtacccgtttatactcctaccagcagggtatgagatttcaagttgctccccatccttgccaacagttttccaactctttcattcctgttattctggtaggtctggagcagccacactacgactttacttcgcacttctctgatggacagtaagaactctgtgacacttgtagcaggcagagggatagaattcacccgagacaacacagagggaagggccccggccagaggctctcaaccaaggagattctgccctcctcaggagacatctggcaatgtctggttatttcaaatttgggggtgttgttaacatctagtggttaggagccagggatgctgccaaacatcctacaatgcataggacaccccccaccaccaccaccacaacaaagcattatttggcaaaagtgacaataatgccacaaatcaagaaacccaaatcaagcaaatcattattgggcattttctccttagccaaatcatcattctctgatacagcacaagaggtcaatgtcctattgtcttaaaatgttatttttcctagagttgaggggatagaaagacaacaaaggatactaagtgccacactccatggcacagtgcatatcttctgcatatcctgtttctttctcagttctcgcgacaatgcggagatgaggaaacagataccaagcaggctccttggctcctctaaactcacgcaaagagcagcagagctgggaccagaagctgtgattttccactgcacccagggtcttacttttaactaaaaataaggggagtttttagagtccacaattcctgttaacttgcaaggcatgaattttaccttattagctttgcaaaaggcaggcaaataaaacgaggtatgagaaaaagatcatttgcaatgttaagattattaacctgcacctgtaagtatcttaaaatatttcaacaaatccaccttcctcatcacacggtgatctctttgaaatgaaacccataccatatttttctttgtctatgcccaatacctgtaagagcaggcattcaacagttaacatgtcctggattaattactggcctgaaaccccagtgagagaagacagaatctttataaaacaagcaggtggtttagattttatttcatcaccaacacaactatatttagtaacattaactagaataaacggtttttgttgaaaaatattcaattaagtcaaataatggccaataccacaaaattctttttgaaatgcaaacaattcaatttttccaaggatgagtttgccagcattaccttatcctcctgtggatcttctatttgaggcttctatttgtgaggccattggcattattagggccaacagaaatccacccactattagagcagttttgaaccgtggccatacattacaatcacccaggaggttttgaaagccatgggtgtccaggaggataatttggtaaatctgcagtagatgaattttgaatttacacccaggaaataactacacttagcagtatcgtttgaaaatagctacccacgtaatttttgcaagctcccctccccttaggggtcaggaccactaccctggagattctgaactgaactgaggagggcacctggctgcttttcatacccaccagagttcaacatcccaatgagttagttgctcgtgggcaggactagggggcgacgtgagcccacctaacaaacagcctggcttccttcccacagggatggcaccacctggtcatttgtatttaaacaattcccatctgctttacacagaaggggcaaaccaaacccaccacccccattctcagcctatcttcttaaattatcaacacccagtagctggaataggacttgaaatggataaacctaccaacacttgactgcagtgagcccagaaatggacaaggcaggatttcctgtttaccccacatagggtggggagtgcggggactaaggggtcctaagaagagacagcatttgccggaggaaacagtggggtttccagtttgtgtctggttccggctggtggcggggggtttctagtgactcgtctcactgcataggagcctgccctcagaggacgcaggcaggtgtcatttcaggcctgtgtactcctctgatgaacggccatctccctcccattcacatccgtgctgttttgccttatcattgtttccccagcacctaacacaaagcctgacactggtgggtgaccactaaacatttcttgaaagaacaaatgggaagggagagctccagaatctaagctgggaacagaggaaagcgagaagcctaaaagaaggagcgaactgaagaatgaaggaagtcaggagggagcgcaggtgcacagctttgtgatgctctgcgtggttacaataaagagatgatcaaagtatgatttcctgaagcacatggtctattgccatacaaaggctcatgatccctaaggaggggagaataatgagaacaggcctaccagggagcacacacgacagacgaggtccattcaccacacagggagtgcttcccaaatattaaagtccagttgctcacttaggatggaagcaggcctctgtggaaagtgacatctgattaagtttgaggtgtgccttttatatgagtggttctctccagagatggtgtccaacacagggagggatccacggtgacatataaggcccccggaggctagaggagttcccaggggtgctggtgttggcagggcctttaggctggaaggctaacaggctaggagcacctgagctggggatctttgcagaaggggctggcagagctcagcctgctgtggctaagccctcaacgtatctgtcaaactctagagctgagatgtccactggggtgcagtagctgaggtcagtaactcctatagggtctgacagtgtgtggtgtcgcattctcgaggggagggagagcacaccccaagttctcaccacagcaaagcaggccactcgcatagcaagccaggtaagcactgggagtcacttcaaagctccataccatgtgagaaccagggatggctttgagaaagaactaggtttctagccaggctctgaggactagccacaatccaggctctcagagaagcaagatgactgtgaccccagcaacaacgaagcacggccctggtcaggcattcagatgccaggaaagagaagagggggtctggaaaggaaggactgacccgaggaggagaggactgtcctaagagcgtctgcagggaggctgggagtaggcagcaaggaggtaaggaaggccagcctggagctgagagcagtgacgggcctcccaagctgagccctctgtactcttcacactgctttctagcaaaaagagcactggatacagagtcagaaaaatccagttcccaggccataacctttgctagccatgcaatcttcatcaagtgattccacctctctaagcttggatgtccatctcggcagcctctgtgttgtctgcccgagccctaaaatccaaggactccgatcattcctcttttccctctccactcttccccacccaaccacaggccgccattcactgcaatctcaagacagaatgtcatgttttatagaatacacgacggtaactggtatttctaggagggttggctcctgggtttatgctgtttttcttacaaatgtggcaagcaaatgagagcttcacctcccaagacaaaaaaataaaaaagagacattttaatcttaacaatgggcatgaagaatactgtttggctcattttcctgctggtatgaattaacaataacaattacagggaacaatggtgagaggatcttaactaacccaaagttctctgtgtctctggagagaacactgaggcaaaacagctgctaactaggaggaatctggctttctcttccgtaaaatgaagagatctaaaactcctggctgtcactagttctaggtgagtctggctactagagggttaaggagactaaccctttcacccataaaagtttcaggtgtaatcctattactttggaatggctagcagtgttctacgaaactattcaaggattaaggttagagaatgcctgtgccctatggtacaggctgccataaagaaaattatgatcctagatgcagtgatgccaatttacatggtatctacataaatgattcttccagctccctcttctccattttctcagtaaaacaagttttttgttagtttttcttcttgagacagggtcttgctctgttgcccaggctgtagtgcagtggtatgaacccagctcactgcagcctcaacctccgggactttaaaaaaggcgatcctccaacctctcagtctccggagcagctgatactacaaatgtgcaccaccacacctggctaatttttgtatttttttgtagagattgtgtctggccacgttgcccaggctggactggaactcctgggctcaagcgacccacctgccttggcctcccaaagtgctgggattacagacgtgagccaccatgcccggctaaaacaagtttttaagagggagagaaatgagcaaatacagcattgcacctgcacgttcaggactgtctactccccaaagcaataatcaaactaccatattttatttatagctgctctcaaggcacaactgcttccaaagtacaagctagaacatttctagtttggtctggaaccacaaaggaaaggtacaccaacatgctgtaccttggaaagctgacctgtaaaacggaagccttcttcgtaatatttaaccaaacacagggcctgacaccttccagtcctcttctgacagatcactgcaatatgtttgctgttttaatatcatgattaattaaagagccagctgacaattttacaaactaggaaggacacagaggaaacagaatacgcgaactattcctggatctttccttttatccagccggcatgtggcacgctattcttcatgagtgagaaaatccatgccctaaattctcactcataaatgcatatttagttaatattgaacaaaaagaaaatagtccaaataatttgtcagatatgcacttataaaacgcactgagtcaatgaatgcaaaaatattttgaagagccaaaaagtgctatcagctgctaatagaagacactagacaaagtacagcatctagaattgtttttattgagagaagaattttgctgagcccagaagcagaaacatccaacataggtacctaacaccacacacatacagcacctccaggcgtcaggcacaactatcctgcccagagtcatgatacaggtgaacacctagaagttaaacccaatatatatacaatttccatgcctctaagaattatttacttgtgtctgggaccctagacatacagcaagcaaggcattcaaacaacatgaatagagtgccacgttaacgaagatctcactccactggcccagaagggattgggatccaaagatgagtaagacacagtccctgtccttgaagagtatatcacagagggcagaacataagacctacaaacaaacaatagaaggcagagggaggacaaatcctattttctttttttttttctgttttcttttctttttctttttcttttttttttttttttttttttgagacagagttttgctcttattgcccaggctggagtgcaatggtgtgatctcggctcaccgcaacctccacctcccgggttcaagcaattctcctgcctcagcctcccgagtagctgggattagaggcatgcaccaccacgcccagctaattttgtatttttcagtagagacggggtttctccatgttggtcaggctggttcttgaactcctgaccttgggtgatcccccccggctcggcctcccaaagtgctggaactacaggcgtgagccaccacgcccagcttcaaatcctattttgaagggacttggggatttcataaaaaaagtggcattggcatgggcccttaaaagaacaagatctcaaagcaggtttgaggaatgcggcattctaaacacagtacttcagtagacacaaacaaagtatttgctataacccattgattattgcatgagcagattaagtgaattttaactgattactaagaacaagagttccgtaaactgtaaaactatttaaaatttcccatcttggccgggcgcggtggctcacgcctataatcccagcactttgggaggccgagactagtggatcatgaggtcaggagattgagacatcctggctaacacggtgaaaccctgtctctactaaaaaatataaagaattagccgggcgtggtggtgggcacctgtagtcccagctactcaggaggctgaggcaggagaatggtgtgaacccgggaggcggagcttgcagtgagtggagatcgcgccactgcactccagcctgggcgacagagcgagactccatctcaaaaaaaaaaaaaaaatttcccatcctgccagccagcagttagctagaagcaggttctgatcttggttcggccacagactggctgcgtgagtttaggcgtgttacagaatctctctgatctacttctgcatctttgaaaaatttggataatgatacagcctgaccattctcctttgatcataccacttttctcatggcatttaatatggcctactataattacacatggctttatctcccctgtagaccaaaccaagagctcctgagggcaaaggcctttgcttatttactctgaaacgcagcccagtgctagctgtgctagcagacacattgtcaatgccagcttctaccctttctgttggattcccacttgctatgaaaatcctttcctttgttctacaaagtacactgttcttcaaatcatgaagtaacccagtttcaaaattttagttttactttgtaagtttcagcatatctctatcccagtatggtggggtttcttgttgttgttgtttttgttttgttttgtttttaatattgtaaatgttataggtttcaaagattatctatttgggaacttgggcataaactcaacatatatacttctcatgcttccaagtactggaagcatgtggaatctgagtggaaaaatcatttaaatttagctttaaaaattaaaaaattaaataacgttgggatccaaaggaaagactcttaaactttatgttaactgaactttcatttcggccttgtttccaatagattgagaaaaagattgaataccaaacagcaacaaaagcagcccatgatgcatttcagtgtcatcagggtggctgtggggctgaattgtaggattatgatagccaaaattctttacaaaactgaacactaccctgctagttgatcgattcaaacacaaagtgtgagcagcagtcaaaattccttctgtcctagagagaagaaatgccctcaggatggagggctggaaagaaagctctctgaggcggctgactgcaatgaaggttgccagtgccccccgactccaccccagctcctcccagtcacaaccactcagcaggctggtaacgcagaaagaacgatccacattgaaaactgagtcatcatgagaaaggctccatcacagacaatgcaaataaggtacaggacaaaggaaggaaaggaatattgccaagaaaaggtcaatgaagacacaccagacagccagagagattatgctggaaagaattggaaagttatgaaccaacatttttccttttatttatttatttatttatttatttatctatttatttatttatttatttttgagaggaagtcttattctattgcccaggctggagtgcagtggcatgatcctggctcactgcaacctttgcctcctgggttcaagcgattctcctgcctcagcctcctggagtagctgggactacaggtgtccaccaccacgcccagctaatttttgtgtttttagtagagatggggttttgccgtgttggccatgctggtctccaatccctgacctcaggtgatctgcccgcctcggcttcccaaagtgctgagattacaggtgtgagccactgcgcccagcctgaaccaatatttctctatgagactttaaaaaataggcatagcctccctgaaacaggaactcaaataagaaacaggacaacaaggggagattaaaagatagcaaagttcagggaagaaatgaagttcaagaagagtgaggcaatcccggaaacggatgccgcactaaacagcaataaaggaagtggagacactgatggaaacacaaccaaatatatggaggacacattccagaaaatcccagtgattggctcaagaaggagcacatgactcacagacattagctgcagactttctggaacaaagcccaagaaagctatcagaagaaacattctccctggctaacattatgtcgccagctgctaccacggtggaagtcagcccaaagacagggccacataacaagaaaaccccaagagaaatgaaggcagaacctgagaacaccatgatcctctgagtcaaactgcacccgaagcccaccagaccttcagacttttcagctatgtgaatcactaaattccttttattttaaaaaattcattagaataagttttccattactggcaattgaaagcttcttgatacacttaagaacagctgaaatgaaaaaagcaaaatgttcgtaattctaaaacaatacattgggaaggcaaacaactgaaaaattattcaaaacaggagaatgtagtaaggtggcttattataaaatggatttatcaaaatccaatatgaaaacaacattttatgtgcagtaggcacaatccaatggccaactcaaaatatactcccaattcccttctcccactgcctccactagagggactgagaaagctgaatgctctctattccacaatttctcctaactaggagtgccatgtaatacggatctggccaatgagacaggaacagaagtctgctttgagcttctgggaaagtttttgcttttcttaattaaaaaaggccagatatggctcatgatatctcattttctctctccttgtcttactgcctggaatgcaaatgtgatgcctggagataaggcagccattttgtgactgtgacatgaaaagcaggagaaggctacaaaataaacaacagtgattacctcagaaaaactaggaacttgagatgggagggactttcttcacaaaccgagttttctttttttaaaaaacacattttataacataaactaggaaataaaattattttggaaatataaaggaaagattattagggtttgcttgcagtagttaggaggtttctgagaggggaagagtaaaagttgggaaagcgaggcagcagagtaaaaggtgatcaagctatgaaaacaacatgagccaggagtttactgaagcagagtttttcaaagtagaaagcagtagaatatacgagtgaaaagataaagggggctggaggatgaggataagccagacagaaatcagacctgactctacagtgatggacactcctgaatagtccctagaggttcctttttagcagggccggggaagtggtacaataaaaacaaagtttgaagtccaggatacagaataagttggcgtttaaagctaaagaaaacagaagtgaaaatcagaacaaattcatccaattcagttctcaagatttcaagattaaaactgcaacatttaactgtaagaatcctaggcaaggcgcggtggctcacgcctgcgataccagcacttagggaggccgaggcaggcaaatcacctgaggtcaggagtttgaaccagcctggccaacatggcaaaaccttgtctctactaaaaatacaaaaattagccaggcgtggtggtgggcacctgtaatcccagctacttgggaggctgaggcgggagaatagcttgaacctggaacacagtggttgcagtaagccgagatcatgccactgcactccagcctgggtgacagagcaaggctccacctcaaaataaaaaagtaaaataaaataaagaaagaattttattgctgtacacactgaagggtttggacggttctgttattacatactttctttacatatccttgtttctgaagtaagcaaaacaatggaatttaatttctctatgctgtaagaaaacacatttgtcatttctttttacatttcattaaaagtaatggcaaaaaacacaattactgttgcaccaacctaatacaatgtaatgtaaaaagaaatgtaggctgggcgcagtggctcacagctgtaaccccagcattttgggagtccaaggcgggaggatcacctgaggtaaggagttccagaccagcctggccaaatctctactaaaaacacaaaaattagccgggcatgctggtgcacacctataattccagctacttgggaggctgaggcaggagaatagcttgaacccgggaggcggaggttgcagtgagcccagatcgcaccactgcactccagcctgggcgacagatcaagagtccgtctcaaaaagagaaaaataaaaaagaaatgcagctgcaaatagaacagaagctggacacagactggtccctggaaggaaggcaaccagagtccagtgcactacttttggatagggaggtaatcaagagagcactctatggggagtccaaagacctggactctggtttcaagtctacctctagctcccatgtggccctgggcaatcacctctgctttctgaagctcagcatgctcgtctgtaaaataagggaattggaccaaaaattcgctacagtccttttcaattctaaattctgtgaatagtttacttcagccttggagctggcagggacggtggctgagagaagaatctggggaccagggctggagaatcagggctgaataacgtgggactgtgcagtaaggggtcacccatgaaacctggagtgtgtatccatctaataacaccatttacattcttgaatattccggaagtcctacacttaggaagaggtactaccaaattccctatttgccctgaatatggggacacataagagctatagtaactataaaacatgttttatagatcttttttaaaattgtgtaattagtgccttaatatgtatgacaaagagtaaaaattcatccagcacgccatgatcttcagccaattcataccagtaactagtgatcaggcatcccaattttcttttctctatttttttttttgagataaggtctggctctatcacccaggctggagtgcagcagcaactactagagattgtcttaaatgtctctagttaatttctaaatcattttgattaattccaaaataaagttccaaatgctgttcaccaaaatgaaagcaatttgaatatttttcttttttttttttttttttttttttttttttgagacggagtctcgctctgtcacccaggctgcagtgcagtggcgccatctcggctcactgcaagctccgcctcctgggttcacgccattctcctgcctcagcctcccgagtagctgggactacaggcgcctgccaccacgcctggctaattttttgtatttttagtagagacggggtttcaccgtgttagccaggatggtctcgatctcctgacctcgtgatccgccagcctcggcctcccaaagtgctgggattacaggcctgagccaccgcgcccggccaaacatcttaatccactctaaaaagtcccccatattgaaatcccaacatgccttcatacacctgcagcttcaccaaagcaacttcacactgtgctgccagccacagcctgaggctgagtgactccggagtggcagaaagagcctgctgagcagctgtgggggaagagggcatccagcattgctccctgcaaaggaagccaagtcctgaccatgcctgaaggcgcctgacaaagtctccacagaacaccacggccaggagaggctgtgacagcactcattcattcagcatatatttactgatcacctcccaggtgccaggcactgtgctaggcactggagattccacagtcaacaaaatgagacaaaactccctcttttcgtgagctgcacattctagtgtatgtgaaagacaaatgagagaaatcaaaataaagcaggaaagtgcaagcaaggcacaggtaggggcaagagacaaggaaggctgctctgagaaggtgcctctgagtgacgacaggaagggaggacacaatccccgaggattagaaagttcattctgggccgggcgcggtggctcacgcctgtaatcccaacactttgggaggccgaggcgggcggatcacgaggtcaggagatcgagaccatcctggctaacacagtgaaaccccgtctctactaaaaatacaaaaaaaattagccaggcatggtagtgggcgcctgtagtcccagctacttgggaggctgaggcaggagagtggcgtgaacccgggaggcggagcttgcagtgagccgagatgtgccgctgcactccagcctgggtgagagcgagactgcgcctcaaaaaaaaaaaaaaaaagaaagttcattctgtgctgcgggaaagcacatgcaaaggccccgaggcaggaggaggccagcgtgacttacaggtcatggaagagccacagttcttatctctgcatgagatgggaagctcctggagggcttccgaacagagcatggccagaatctgagttcccattttaaaggcccactccagcaccagcgtggagaacagagagaaaggagatggagttagaaacgggaaagcagctatctgtggactagggtgctagtcacagtgatggcaaaaagtgatcagatgtgagatatatctgaaggcagaacaaacagaatttgctagcagacagtttgagatgtgagagaaacagaatcgaggatgactgtaaactttctgggctccataaaagacaaatgcatatctggacataattactactcacactggacacaggcttggaaatccagagccaaagacattctgtaaacaccaaaagggcatctctaaggacctgaaaacctacaggcttctaaggctccttaaaactccaaccttacaaagaaattcactgtaataagtagttacttacaaaacatgaatgctacaaccctcctctgtgctcccctccactccggtgtgcatgcgctctcctatctgcggcgcctgctctcaggttccccctctccagcctccttcctgactccgcttcctcattccacacaccttgatgcagatcttctccaaagatctagcctcatttgccctttcttctatctctacagtctttcactcagcaatctcaatcacttccagcaaccatctcttcaaagaaaaagaccccataaatttctatctctggcctctttgcaccacaggttgagaattcaaattacatccttgatgctagtagtgcagatgcctgccgcatctcaaactcacaaagccctacactgagactccaatcttcccatctctttggctaaagccaggggcttatgactgagtgacaggttacagagcttgggcttcattccataggttaacatggtgcaaaatacgattgctgagctttgcaatgatctgtccttatctttccttctgaacgttcatacatgttatctgtttaacctctttagcatgtcaccttctacctttatattacgtacctttatattaggtaaattgtgacatatactatttacatattgacatatagtatatgctatgatcatttatcatataccatttatctgcatgttttatcttacctattaggctatatcaccatttaggacctattggatttacctttacataacttctgtgtactaccagtgtacaggtgctgcccatagaaaggcctcaataaacatttgtttgatacaaaacacatgtgtagaagaccatggaaagcgaccaaacatcaaagccatctcattacaaatttcttcaaaaggtgcttcctttaaaactcccccagtatcattatcccttgggttacattttctttgttctacaattaacaaacgttccttacaaatagagaacctttctgactcatttcatgagggtctcaaatttctatcttcttctttttttttttttttttttttttttttttgagatggtgtctcactctgctgcccaggctagagtgaagtggcgtgatctcagctcactgtaacctccgcctcccgggttcaagcatttctcctgcctcagcctcccaagtaggtgggattacaggcacacaccaccacgcctggctaatttttgtatttttttgtagagaccgggtttcaccatgttgcccaggctggtcttgaactcctagcctcaagtgatctgcctgccttggcctcccaaagtgctgggattacagatgtgagccacaaatccagcctcaaattcctatcttcaagccacaggaaacaactcatttcttcaagatataaataaataaataaataaagagcaaacaaaccccaagactagtattttggagggagacagaatttcaaatgtcaaaacaactttgctctcatcttctgagatgccctttagggtaaccattttttctaaatgcatcatgcttactattgcttgtggaaatttgcttattcaaatgatccaatcccttctccttgctactaaaagtgcagccacctaccagcagcatcagtggcagctgggagcttgtcacaaatgcaaactaacgagccctatcccagacatactgagtcagactctttggggcccaggaatcttaatttaacaagatctctgggtaaacgtttgagaaggacaggcctatcccatggccagagttacctttcgaaaacccatctcaacgtgtcatcagaaaccttcaatggccacagtataaagtccaagcctctgcagaaagtgaaggatcttatcatttaattgccacaatcttcccattaagtcaatcagcatgtgttgaccacctgctcacacgccaggctctcttgcacgtttggagaagatagcagtgaacttggctgacagccctgctctcatggaacttaccttctcagagggaaactgacctcagaactcatctcccaactaaccatcccattacctgtgttctactcacactgctgtcttcacccttctccaagtacatccacacattttacatttcatgccagggttcgtgctgtttcaaactcaataccaaccaggctgaaatcatcctccttactctgggcttctgctcgtcctctaacacagcaaaggctgcatccctagactgtgattcatatttaaatgtctttttctcctctgctgggcagtgtgagcctcaggggcagaaccatagatccttcatccttgtatacgtggcacctagccacatggcttagaataaatagcatttaattaaatattcttaaaaatacaactcagggatagaattttggcagtgttcaaaatgcttcctttggaaatctttaaattttcctctaaagccggtgtggtggtgagagcctgtactcccagctcaggagaaagccaggaggatccttgagcccaggagttcaaggttgtgatgagctgtgacgccactgcactccagcctgtgcgacagagtaagaccccgcctctaaaaaaagaagaaagttttcctctaaagtctaagaccttcttttttaatgatattcatttaaatagtggaaaatatcctttgacagtataattacaattttggcaatggtctaataaatggtgtaagagggtgatgaagatgggcaatgcaactgctattctaaaacgaactttaaatattaatagaactcattattttggtacattttatgactgaaggcaactccaaaaatgtcttgcacagtgacagcctcactgtaatatttttattctagagtaaggaattagaataacttttttttttttcattttatagacacagggtatcgctctatagcccaggctggagaacaatggtgtgatcacagctcattatagcctcgacctcctggtcccaagaaatcctcccatctcagcctcctgaatagctgggactacagggcacacaccaccatgtactgctaattttttaattttttgtagagatagggcaagattcctggcctcgagtgatcttcttgccttggcctcccaaagtgctaagattacaggcttgagccaccacacccagctagaatatcactcttttcaatgtttcaattctgccatgctttggtaaaactaaacagaatccctcttccagcaggtaaatcttctgttaagacaatcattcatgttttcaagaatgcattatgtatgggaggagggtgcggggaacatgtctgtttctaaaacaaaaaaaaaaaaagcaagaatattcagatgcggatgggctaccgtaagtcttccctatcatcctccctttttctacgcccctcccacaacttggcacttgaggcacctccagtgttccctggaagacattcaaaagcaaaataaataatggaaagaaaactgaagtctacgttggaaaacctttgtcctaatcccaaacgttatgacctcaggaaagtacttctactgtctgcacctcagtttcttaaaaggaaagctgaggttccttccagtttaaaatgctagcactttcgaatgttttcgtctctagagatgagagaacatgccaattcacctgcgtcccaacagcccttttgggaggtatgcacgcagctctacttaagatttgattgaatgaagtcacacaccattaaacattttcaacattcctatcctaaatatgccttcatttttgcattacatataagtaatataaccaatagctatagtaaacattactgaggctttcttttttttaagacaaaaataagtaaatgtctatactgacttcccatactgtctttggaacccactgattgagagaccagtatcctgcctggatattaatgggcacctgccacataaaagagagagtggtgggccaggcacagtgactcacgcctgcaatcccagcactttgggaggctgaggctggcggatcacctgaggtcaggagtttgagaccagcctggccaacatgatgaaaccccacctctactaaaaatacaaaattagcaaggtgtggtggcgcatgcctgtaattgcagctactcgggaggctgaggcagaagaattgcttgaacccaggaggcagaggttgcagtgagctgagatcgtgccattgcactccagcctggacgacagagattccgtctcaaaaataaattttaaaaaggagagggtggtgcattaaggagagtcgacagcagctgcccccgtccttaagaccacagtcaggactcaagcacaaaaagtgttttcatgaagtaatgaggctttagataaacataccacacttttctttgcaatactattttgcaaattaattaatttcaattaagaaatgtcaattaagaaaatgtgaaaatcaaaagaacatttttaccatggtgcagacctggatgtctccaacttttgagtgcacaggactcagggattttgtcaaaatgcgtattctcagtcatcagttccgcagcgaggactacgattctgcatttctaacaagttcccaggtgacgctgtgggccacatgtaagtaacaaagaggtagaaaacacagttgtccctcagtattcgccggggattggtcccaggacccccaggtgtacaaaaatccatgcatactcaagtttcgcagtctgccctgcagagcccacctgtatgaaaagtcaagggttccacatcccacaaatactctattcttgatctgctttgaaaaacattcccatatggggtggtggaccctcacagatcaaacatgttgctcaagggtcaactgtatatgccaggcagcaatatgcttcctaaagggactcattctgaagatatgtgatctaaaaattcactttttttttttaaataacttcaactgggaaaattccacgaagccagaccctgggctcaaagcccaggatcccagccacacatctcttaaaaataggttttcaaaatgccttgcattttttaaaaaagaatagcatatttgcctaaaattctagccaaaatgcttgatattcaccactctattattattttttgactaacttcttccttgttcagttctcacttcctcctcgcctgtcactaagctgagtcacaaagctgtcaacgctctgctgcttgccaggtagatgcaactcctttctccatttgtttatctcctgcaaagcggaataatttttctaaattcactcagattcccagtggcacacagtatcatgcagaacagttgtggaattaggaaaccaacaagaaattttgtacttcctgaaattttgtggttacttcaaatcatcatcctgtaaagataacaaggatgagtccctttgcaaagcaaaaatgctagttaactacaaaactggaatttaagtacggaaggtcaatttcaaatgaattcacaatgcaaaaatctttcagacacctgagaagtaacttgactattgaacactgtactcgtagagttaaaatagctcaagaagaacgcatatgcttctatttagtgtttttttttaatcctgttgcaaattctactattctagtattttcttatgtttaaaaatatcttaattctcatttactatccctggagcaatatccctggcaaattcttcataattccccatgagtcttccagcacagatgcagctttccaagtcaaaatttgtacaaacatcatctgtcaaacttctgcaaggtaatgacatactcatcctgagctgtcacctccccttgcagagactttgctaaaattcttagcatagcaaggactttcaaacagctttctccagcccattcactgtacaggtgaggacacggagaaccggtaacttgctttacttctacaaaaatgctacaatgcaaatttataatgctacggaaaagattatcctggcttcttcacttatgcattttctaataatctacagaaggcagagacagccaatgatgagaaataaaagctctctatttataaacacgtacctaagaagctactaataaaaaattctataaaaggaaaacgagaacactgaactctctatcatatttgaaaaagaaagggcagacatcgcacaattcaaacccagcttccagacttcagggagctctagaaacctgaccagcccacaacaaaagacccagccaccggactgggggttccacaaacagtcagccctcagagatcacccaacattggggctcagaatataagttttgcacatccccttttttgaattcaggaatgtcttccctgcccttaatcacaagcagacaaccagatatctgaggaaagctactaacgtggaagatagagaccaagttaaaccagaaaagcaaatcagaggacacagagactatacaagaagaaaattaaaatatatatatataccaagtacctcagaattacagtatccataaaacagggtgtgattttttaaatagttctagaaaacaaaaaacacaatagcagaagttttgaaaatactgacagaaggattagaaaataaagttgagaaaaatcttccaaaaagcagaacgagtccggaagggagaaagggggaaagggggggaagtagactagtccgggaggtccaaaaactgaaaagtacaattgccagaagaagaaaagaaaggaagctgagatatgaaaatatatcagtggaatctaagaaatatcccccaggaatgagtttctagattgaaggggtttactgagtgcccaatataatagttgctttttcttctaaacccccaagtcatggcatttgaaatttcagaacactagggacaaacagaagatcccaacagtttccagagagaaaaaactggtcacacaccagcagatacaaaatcagaatggccagatgtggtggctcacgcatgtaatcctagcactttgggaggccaaggtgggtggatcacttgaggtcaggggttcgaaaccagcctgggcaacatggtgaaatcctgtctctactaaaaatacaaaattagctgggcgtggtagcggcgcctataatcccagcaactcaggaggctgaggcaggagaatcacttgaacccaggaggtggaggttgcagtgagctgagatcgcgccactgcactccagcctgggtgacagagcgagactttgtctcaaaaaaaaaaaaaaaaaaaaaaaaaagaaatcagaatggtttcacatttcccattggtaacacaaagccagaaggcaatggagctcgcctccaaaaccctgaagaaaaatctacaactgggaatgctacactcaatctatcaatccaatgagaatggagaataaagatgttttctgcaatatctcaaaatttatctcccacacactctttgtcaggataagctcttccagcatggaagagtgaccccggaaagaggaccacatgagacacagcacatgggagaaaagtgaaggattccccagaacgaacgcgaagagggatcccagcatggcacttgtgtgtcccagacacggaactgcggctagagagccaagacacaatccccgagagttactctgtgcagtcactgtgctaagcagtgcacagacagcatctcatttaaattctacaataagcctggagatcagcaattattagctgctattatgggaattttaaagatggggaaagagtcagctaggttaatctccccactgtcacacagctttacatggcagagatgaaaattcaaacccaggcctgccacccttttacacctacacacgtgtccactgcaggattctgtgagataaaacagaaacctggaaatgtgaaggaaagaaaggaaacacggattaaaaaggcaaagaggacagacacaagaaacgggacacccaggaagagatgagcgatgggtgttatgctgttctgtatttatttcctattttaatgatttttccaaattgaaaaaggaaggggagaaatataagtgaacaggaggagaagaaagtaataagggggggaaatggaaagacataggaaaaagacatgagactaaggaatacaactggaatgacactctttggcattcagaaagtgtagtcttaaatagcatattctccctcgatgatgtgaagtgatacatctcattcattactaaatgttcaaatccaagggattcccaaattccttccaaccatcttttcggttttaaccaaaatgcaacataggctgggcgcagtggctcacgcccgtaatcccaacactctgggaggccgaggtgggtggatcacctgaggtcaggagttcgagaccagcctggccaacatggcgaaaacctgtctctactaaaaatacaaaaattagccagtcgtagtggcaggcgcctgtaatcccagctactcaggaggctgaggcatgagaatcacttgaacctggggagcagagggcgcagtgagccgagactatgccactcactgcactccagcctgggggacagagcaaggcactgtctcaaaaaataaaaaataaaaaaataaaaaaatgtaacataggccagaacaggcatgaactatgcgtgatgtgcttactacattcaggggttctagggcagtatggggcttgtctaactccatggactcctccacccataaaccaactcagatgtgtttgttcatatgcttttaaacaaataaaatgttttacacaaatgtaaaaccccacggagaaagaaaaaatataaaagtgtaatatataagttatccattccatagacctttacagaagctcaccttaacaatgctgttacttagatatggaaaactcatttgcctaacatctgcaaaactgctcagagataacaaacttaattctttttagatacctttcttaagagattaggcaataaacatcatttagttaataattttcaactaaagcaaatacattatataagttatacccaatagagttgaaatatccaattcagtaaaacaaactgttcagttaactagattaatggtagcctcattaacagatgttctgacttgatttgcgtgtttttcttacattttactctcatacaaaaatgtctgcttgccttacataaagatatacattgccttcaacagaacctaatttactttatcatgttttattctttactctcactttatcttagttacacaccatatgtgaccttcaaaaaccacagagagccaaggactatgagcagttcagaaatcccacggatttgtataattaaaaataatttttggccgggtgcagtggctcacgcctgtaatcccagcactttgggaggctgaggcgtgtggatcacgaggtcaggatatcgagaccatcctggctaacacggtgaaaccccgtctctactaaaaatacaaaaaattagccgggtgtggtggtgggtgcctgtagtcccagctactcgggaggctgaggcagaagaatggcgtgaacccaggaggcggagcttgcagtgagccgagattgcaccactgcattccagcattccagcctgggtgacagagcgagactctgtctcaaaaaaaaaaaaaaaataaaataataataataataataataataataattttacaacacctataggctattgatctgagttaataattaaagaaatataaaagaacatggtgctgaagtataatatttcatctactgaatcacaaatcttgaaaagaaaggccaatatccaatacaggtgaaattaatacaactgtaactattttgtggcatgataaatttattacaaaccatttagaacagtttgaatatatttggatataaatataaaaggtttgcatataaatataaaaaacatctaagaagtgttgttattttattcagcaatcttcctagaattaggaaaaaactgaaaagaaaaagaatattaaaaaatagtccctacaataattattataagcagcctacttaataaaaagggtaacggattaataagtaaattatattacatcaactccacatattatgctgccacagtagcactgtaaaatggtttaaagcatttgatcactttgtatttaatctattcattaaatttttttgatataaaaaaatttaaaaaataaaagtcatgcgtaattctaccattaagagataactacagctaaaactgttacactttttttactgtgcaacacatgcatttatggcagagttactatcatcctatatatgtagttttattgttaaatattttggttgttttcagtattttacaacactacaataaatatcactgtgcaaatctcagatgattttcttagcatacattcctaaaaggagaactattgagttaatggtatgagtagtgtgccaactggtactcccataagtgagtgagtgtgggtataatttgtaatattttttaaaagaacagactgcaattttttttttttttgacagggtctcacgctgtcgtccaggctggagagcaatggtgtgatcatggttcaccatagcctcaacctcccagacaagtgatcctcccacttcagcctcctgagtagatggaactacaggcaagtgccaccacacccagctaattttttttgtattttttgggaaaacatgaggtctcgctatgttgcccatggtggtctcaaactcctgggcccaagtgatccacccaccttggcctcccgaagtcctgagaccacagacatgagccaccgcacccagcccagattgcaaatttttagaagtgctatagcgcgtatgaacaaaaactagaatatacaagtaaccaagttttaaaatttcagttaggccaggcacagtggctcacacctgtaatcccagcactttgggaagctgaggtgggtggatcatggtaaaacctagtctctactaaaaaacaaaaaattagccaggcgtggtggcatgcacctgtagtcccagctacttgagaggttgaggcaggggaatcgcttgaacccgggaggcggaggttgcagtgagctgagatcgtgccactgtactccatccagcctggcgacagagcaagacttcgtctttcaaaaaaaaaaaaaaaaggaaaagaaaaaacatcagttaatgtgtagccatattgctttacagtctaaatgaataacttctgggctagcttcaacggacgccatcattctcagattttagccctcaagaatagaggctccctagtttgctttttgtttttgaggcaatagagtctcactctgtcgcccaggctagagtgcagtagcgccatctcagctcaatgcaacctcccacctcctgggttcaagtgattctggtgcctcagcctcccaagtagctgggactacaggcgtgcgccaccacatctggctaattttttgtatttttagtagagatgaggtttcactatgttggccaggctggtctcaaactcctgacctaaaatgatgcatccgcctcagcctcccaaagtgctgggattacaggcgtgagcctctgcacccagcccaaggctccctagtttgattcacaccacataaaatgcctctctgacccacagctaaattcttagtgtcatggtattttccctccagaacacagagtagtaattctgacttaatgacctttctgcaggaacgccactcgtggcagcaacattcctttcctttaaagtggcttttgcttagctgtgaccttagcatttcatcctaacccaggtgaggaatataaagtcattcattataatattctccctcaatcacttgagtccaggaggtcgaggctgcagtgagccatgatcgcaccacggcactacagcctgggcaacagagtgagacccttaatatacatacattctccctctttgtttatgttggaaattttttataataaaaaaaatttaagtacattaagttttaaaacaactcatagcaaaggaatgttcctaagaagtgccatctaattttgtaagtacagtcatgccctgcataatgacgtttcagtcaatgacagatggcatatgccacggtggttccataaggctataaagagctaaaaaattcctactgcctactgacatcatagccgtcataatgttgtgcaacgccttacgtgtttgaggtgatgctggtgtaaacacacctgcgctgccagtcatataaaagtttggcagatacaattacgtgcagtatataataataatgagaataaatgaccctgttattggtttatgtatttactgtactttttatcactcctttagggtacactccttctacttacatgtattttttaaagttaactgtaaaacaaccccaggcaggtccctcaggaggtgtccagaagaaggcattgttatcacaggaggtaacagcttcatgcagttactgcccctgaagaccttccagtgggacaaaatgtggaggtgcaagacagtgatattgagaatcctgacccttgtctaggataatgcgtgtgtttgtgcctgagtttttaacaaaaaagttttaaaagtaaaaattgaaaaaaaaaaatttagtagaaaaatgtttacagagctgggcgcggtagctcacgcctgtaattccagcactttgggaggccgaggcgggcggatcatgaggtcaggagatcgagacgagcctggccagcatggtgaaaccccgtctctactaaaaatacaaaacttagccaggcgtggtagcatgtgcctgtaatccctgctactcgggaggctgaggcaggagaactgcttgaacctgggaggcggagcttgcagtgagccgagattgcaccactgtacttcagcctgggcgacagagcaacactctggctcaaaaaaaagaagaaacatgtttatagaatgagaatataaagaaagaaagtatttttgttcagctgtacaatgtgtttggttttaagctaagtattattatgagtcaaaaagtttttttaaaaaaagtttatcaagttaaaggtacagtaacctaaggttagtaatttactgaagagagaaatatattttaaaaataaagttagtgtagccttcatgtacagtgtttgcagagtcgtaggacacacgactgtccttggccctcccattcactcaccactcactactcacccagtgcaacttccagtcatggtaagtgccctatacaggtatttcaatgcttatcttttattctgtatttttactgtaacttttctatgtttagatacacaaatactcatcactgtgttcaaactgcccacagtatcctgtgcagttgcgtgccacaggggtttgtagcccagatgcaacaggtgatcccacacagcctaggtgtgcagtgggctgagtgcagtgggctgtgagcctgggttcatcaagcacgctctgcgatgttcgcagatgacacaattgcctaaggacgcattctcaggagtatccctgctatgcaaagcctgactgtactccctgttataaccatgagctgttttccacagcagcatggtcatcactatccccagacaccaccaaatttacatctactcagagaaataattatattcaatttaaaattttaaataagtactacacaaagatactctggaaggtcaaaagccgcatcatccttggcctgaggaaatcaagatgatcacagggctgtgcgggagaccagtagtgccaaaacacaaggtccagtaacacactaagacgaatcccaggaagacagcgggaggacatcgcacaacgtctcagtgcacaccattcagccactcttttctcacccacacactgatgccaacttcctgagtaacattccgagtaaaacgtgcacgactcactccagacagtccacttagtgtccacccacactcacgtggcataatggaaaggacgcctgctaggaagtcagccaggcctggtttcccatcccatctctgccaccgacttgctgtgagaccacaggcaagctgcgagccctgcaaagcagagatgacgcttctcacctcagcacttagtatggcacctggtgtggcacaggcacgcgatgagtatctgttgagtgaatgggagggtggcggaatccccgccgtgaagctgcctacacgatttcaatgggagcctcccactcccccgcccccacgcctcccttcccttctctttctatgggtctctgccttccctccctcagaaacgtgctagtcccatggcgttcataattgttctttctaaatacattccaaatcatatttctttttttgtttgttttgttttgttttgagacggagtctcgctctgccgcccaggctggagtgcagtggcgcgatctccgctcactgcaagctccgcctcctgggttcacaccattctcctgcctcagcctcccgagtagctgggactacaggtgcccgccaccacgcccggctaattttttgtatttttagtagagacggggtttcaccatgttcggcaagatggtctcaaactcctgaccttgtgatccacctgccccagcctcccaaagtgctgggattacaatacccagtgtgcctttcttcattcattcattcaggagcctggctgtgctctagacactgcgaacacagcattaagtaggctcggcgttgggagcccgctgtgatacagcccgtcggctcatggaggagctgaccttccaccgggcaccatgggcacagggccttgggcccacagcacttttggggcccatgaaaattgtttgtttccacaatctcagaagaaaaaacatgaactattaggatgaaaaaaatgttttactatatagtattaatatttcatttgcataccaatgcagttgtaaaatataatttgtaatatctttttaatgaaggaaggggcctacagaggcacagatgcctcaggctcatgagtgtcagatgcagcccaaggaaacacatgctaaggatggaatgcaaaggagccagcgagtaagattcgagaagggcgtttcaggcagggagcatagctgctgcacaggtcctgaaacagggcgacggccataacagtgcgagggaaacaggtgacatgacaaaggccgggtgtggccacatctccaaggcataaagacaaagtgggacacagttaaaaatgatacgggatttaggccgggcacagtggctcacacctgtaatcccagcactttgggaggccaagtgggtggatcacttgaggtcaggagttcgagaccagtctggccaacaaggcgaaatgctgtctctaataaaattacaaaaattagccaggtgtggccgggtgcagtggctcacgcctgtaatcctagcactttgggaggctgaggcaggtggatcacttgaggtcaggagtttgagatcagcctggccaacatggtgaaaccccatctctactacaaatacaaaaaattatctgggcgtggtggtgggcacctgtaatcccagctacttgggaggctgaggcaggagaatagcttgaacccgggaggtggaggttgcagtgagctgagatcgcaccactgcactccagcccgggtgacagtacaagaccctgtctcaaaaaaaaaaaaaaaaaaaaaaaaataggcaggtgtggtggtgggcacctgtaatcccagctactcaggaggctgtgacacaagaatcactcgagcccaggaggtggaagctgcaatgagccaagatctcacaattgcactccagcttgtgtgacagagtgagactttctccgatgaagaatataactttctctgatgctattgaaatgcctcctttcaatagcgatggaaagtggaagagtaccaggagtagttacaaggtgtagatttccacataattgaacttgtccaactcctaaaactgtttaataacggacagtttagtgaagtaacaaactttccatctcttacatccaagcagaggatagaagccaaatgtcaggaatcttgcaaagggaaccctgcataaaaaggaagattgaacaagaggacaatcaaggtcctatccattcctacaggcctaaattagcatcttctgcatggaagtcttcaaagggaagcagaggtttcctgcaagtggggcaaattaaactacacgagaggccaggcgcggtggttcacacctgtaatcccagaactttgggaggccgaggtgggcagatcacctgaggtcaggagttcaagaccaaatggccaacatggtgaaatgctgtctctactaaaaatacaaaaaccagccgagcgtggtggtgggcacctgtaatcccagctactcgggaggctgaggcaggagaattgcttgaacctgggaagcggaggttgcagtgagccgagatcacaacagagcgagactctgtctcaaaaaaataaaaacaaaccacatgagatatgaccttaccccaatcagaatggccatttattaaaaagtcaggaaacaatagatgttggcatagacatggtgaaaagggaacacttaaatactactggtgggataataaattagtacaacctctatggaaagcagtatagagatttctcaaagaactaaaagtagatctgccattcaatccagcaatcccactactgggtatctaccaaaaggaaaagaagtccttatattaaaaagacacctgcatgtgtacatttgttgcaacacaattcacaattgcaaagatactgaatcaacttcagtgctcatcaatcgatgagtggataaagaaaatgcgatgtgataacctgaggtcaaaagttcgagaccagcctagccaacgaaaccctgtgtcaaccaaaaatacaaaaattagccaggcatggtagtgcatgcctgtaatcccagctactccggaggctgagacaggagaattgcttcaacccaggaggcagagtttgcagtgagccaagattagacgactgcactccagcctgggtgacagaggaaaaaaaaaaccaaaaaactcaaccttgtaaaaataactcaactcttacctttgattatggcatcctgtaatgaaaattttaaatcctatatattctaaaggttttactttttaacttctggatattagtcttacttaaggacttcccagacaggtgtgatggatcacacctgtaatcccagaactttaggaggccaaggcgggtggatcacttgaggttaggagttcgaggccagcctggccaacatggtaaaaccccgtctctactaaaaatgcaaaaattagctgggcctgatggcacttacctgtagtcccagctacttgggaggctgagacaggacaattgcttaaacctaggaggtggaggttgcagtgagctgaaatcacaccactgcactccagtcagggtgagagtgagaccctgtcacaaagaaaaaggaaggacttccctaccacaagtttgttattataatatatatgaagaatataaacttttaaatatatggttaagttctttaatccatatgaaatttattttggatagattttgggatggaaatttatgctaacaaatttagcatgaggtaaaaaactttccctttttttttctttaaaaaaaagacagggtcttactttgtcacccaggctggaatgcaatggcatgatcatggctcactgcagccttgaactcccaggctcaagtgatcctcccacctcagcctcacaagtagctaggaccacaggcatgcaccaccatgcccagctaatttttttattttttgcagagacagggttttgctattttgcccagactaggctcgaactcctgagctcaagctattggaccacctcagcctctcaaagtgctgggattacagatgtgagccaccacgcctggtccctaacataactttcttccaaataactggccaactgtttcaacctttttctgtgtgtgtgtgtgtgtgtgtgtgtgtaaacagaaaagtaaaatttctattttcatttgcaattccttttggttttcttttccgtttgtttgctttttgagttttttgtgatttttttaagttcagaaataaatgtgcagttttgttttataggtaaacttgtgtcacagggtttgtagtacagattattttgtcactcaggtactaagccaagtactcaatggttattttttctgatcctctccctccacctgccttccatcctcaagtaggccccagtatctgttattcccctctttgtgtcatgagttctcatcatttagctcccacttataagtgagaatgtgaggtatttggttttttgttcctgcgttagtttactaaggatgataacctccagctccatctatgttcctgcaaaagacatgatctcgtgcttttttgtagctgcatagtattccatggtgttgttttttttttttttttgagatggagtctcgctctattgcccaggctggagtgcagtggtgcgatctcagcttactgcaacctctgcctcccaggttcaggcaattctcatgcctcagcctcctgagtagctgggaatacaggcgcgtgcccccacagctggctaatttttgtatttttagtggagacggggtttcatcatgttggtcaggctggtcttgaactcctgaccttgtgatctgcctgccttggcctcccaaagtgctgggattacaggtgtgagccaccaggcctggccacattttctttatgtaatctgtcactgatgcacagttaggctgattccaagtctttgttattgtgaacagagctgtaatcaacattcacatgtgtctttatggtaaaatgatttatattcctttgggtatatacccagaaatgtgaaaagataatctacaaaatgggagaaaatatttgcaaatcattcatctgatgagagtctagtagccagaatagataaagaattgttacaactcaacaacagaaagacaacaactcaactcaaaaatgggcaaagcaagaggtcaaggcggtggtgagctatgatcacactgctgcactctagcttgggtgacagagcgagactccatctcaaaaaaaaagcttttttaaatgggcaaagcacttaaacagtcatttttccaaatcagctatacaaatagccaaccggcacatgcaaacatgctcaacatcactaatcattaggcaaatacaaatcaaaacaacgagataccacctcacgcttactaggatagctactatttaaaaaacaaaataacaaatgttggtgaggatgtggagaaattggaacccttgtgtatgggaatgtaaaatggtccagtctctatggaaaacagtagggcagttcctcaaaaaatttttaaaaaatttccatatgatccagcagctctgcttctgggtatataccgaaaagaactgaaagcaggctctcagaaaaaatatttgcacactcatgttcatagcagcattattcacttgggtctgttgatctgtccatccacagataaatgaacagtggcctatacatacaatggaatattatttcgtcctaaaaatgaaggaaatcctgatacatgctacaatatggatgaaccttgaggatattatggtaaatgaagtcagtcagtcacaaaaagtcaaatatcgtatgattccacatatatgaagtacccagaatagtcaaattcctagagacagtggagcggtggttgccaggggctggtaaatggggaaatggggagttacgtgttcaaaggatgtagactttcagttttacacaatgaaaagagttatggatgggtggtggtgatggttgcccatcacatgtatttaataccactgaactgtacacttaaaatggttaagatggtaaatttcatgttatgtgtatttcatcacaataaaaaacaattttttaatcattcttcctccatggattttaaattttgtccctatgacatataaattcctatacctcacgtgtatacatgtttctgagctccattctgtttcgtttattctatctcggcatttttcaaacaataaggcacaatccattggtggttcctaaaataggttgaatagattataaccaccattattgttgttatcttctaatgaagtagaataggatagaaaacagaatacgtctaacatagtaaagtattaacccatgaaatttgtttatatacatacatatgtataggtggtgttggctgaattgtaaaatacatttgttactatggatttgtagctcaaagtttaagaaacactgctgtaattatccctatgtcagtattatcccattccaactacttcatagcaataaaatttataaagtgttttaatgtctgatattaaaataagcaagcaactcccttccctccccacctcttatctttcaaaatttttcaggtaaacttaagaatcagcttatcaattaaaaataatacttttgatattccaattaggatgtatttaatgtacagattaatttgaatgtaactgacatctttgactgaattttcctatgtagaaatatagtatttccttttattcagaaaaggaaatacatgccatatttctatttcagtagttttatgatttattcacaaaggtcttaacatgtatcttgttagatatgtccctaaataattgaagtctatggttgatatgggaatgagttttgtttttgtttttgtttttttgtttaagagatatggctcttgctatgttacccaggctggtgtcaaactcctggcttcaagcaatcctcccacttcagcctcccacagtgctgggattacaggtgtgaggcactgtacccggccctgagacttttgagataatttctaactggttatttcaagagaacaaagataatattgatttttacatatcactcttataaccagctgccttaattaagtctctaatcagtcctaggaggttttcccccatttattgttacgattttctggtaggctattatgacatctgaaaattatagtttttcctatatcttttcagtttttatatatcccttttttaagaaaaatcactagctagaacgtcaagttcaatgctacttgagttgtgtcttgctcctaacttaatctgttccaccattaaacatattcattgtaagtttctatcagatatattttatcaattaaagacagtttcttttgatttacatcttattgtttttatcacaaataggtgccgaatttcatgaaatacttttttagacttctgtcataaatatattaatttttcctttaatctgttaaagtaatataatttattacattacaaaagttactattattgaaacatccttgcattcttgtgatgcaaatggcttacttcgacatgggatatgttactctttcaatataattgctagcctgaattttatttaactttgtactctcatatctatgtacttgattttatatacatacaactttgtgttttatttggctttagtatcatgttatattagcctcacagaaagaattacaaagtgctctatactataaaatagtcttataacatagggaaatctgtttctttaggatttggtaaaattcacctataaaaccatatgggcctcacatctctgactacttgttaaatttttaccatgattattgaccaatttaggtttttaacctctttctgattcaaacagaatcatctatttcatctacattttccattttttggttacatgtgcatatatttgtatagtattctcatctatatacatagtaatatcccttttcttgtttcatatatgttctataattatacattttgttctttttcttaatgaattcaccaaaggtttgtttaatttattgatctattttagaaaacagtttttggttgtcagtttttggttgtattttttaggtttattggcttatcttcatttataaagataaaagtagactgggcgtggtggctcatgcctgtaatcccagcactttgggaggccgaggcgggtggatcacctgaggtcaggagttcaagaccaccctggtcaacatggtgaaaccccgtctctacaaaaatacaaaaattagccgggcatgatggtgggtgcctgtaatcccagctactcgggaggctatgacaagagaatcgcttgaacccgggagctggagggaggttgcagtgagccagtatcgtgacactacactctagcctggggactgagtgagactccatctcaaaaaaaaaagagagagagagatcaattttttttcttttggagggattgaggagatactggttaaaaaatacaaaatttcagcacaatgaacaaatgttcttaactgaaaacagaggaaaaaagttttcttctttctgctttgggtttgtcttgtagtggagggtgttcctttggctcacttacttcccatttttctaataaatgcatcttcttttcaatgtttcttggcctcagcccaccagaacatgcatctgatgcatgttaagactctggggttgacctccatgcctgttcctttcctcgtcccgcttcctatctctgactttttgatcgttctgcaatgttttgctctctatcttccagaccgctaatttggtctttaattctatttgcttctcaagccaacctagttaaccttttaagttcaatcaccacatttttaatgtccatgaactttcttgttctaaaagatcttttttcacaacaggctacttagattcactatacagcagctcaaatctctttgaagataccgactaacatgtttttggcttctgctatgcgccccaaagtctgcttactctgggctttttctttcatactatttattctcctcaaatgtctggtgatcctttgatgtgcattcacactttggaataaaagactgggccaatcaacaagggaaaccactgcatgcttccagtctggtattaacgctctcctggggaaggccagctacctgcaggctccgtgtaagaggacagaaagtgtccaatgatgggctttgctttaaggtatacaagtaaacaagcacggaggcagagtgggggacaaacaccaaatctgccaaaacagtctctcctccagtggcgaaggacgttcacagataccgcctgctagagggcctacatttccttcccaggacccctgttactgcaggagcccgcagggatctgacactctgctcggcttctctctcaggccccaacaccccctcaaggatccctccccagacacagttctcagtttttagccagagaccattgtataaatgtaatgcttcgatttcctaaatattactctagggccccttcctgttggtggttgttagtcactgtaaactcagcttttaatcccccccttttcttttgcacctgtgttttgagttacaattgttttgtttttgttttccttttgtcaatataatcccatctgttttcagtcttccaggaattcttcataacttttagtttaatagaggtaggcatcctttcaaattttctaatactattacagatgttttaaaatatttaccttttgttatttaaaaagatttttggcaagagagaagctggatgcatgtgttcagtctgccattttactcctaaaaatccagattgtcctcctgaatgcctaaatacttttttctaatttaaaatgctttattcaaagcaccctaaactagtacttcgctaggaaactgaaaaatattcctcttaattctgcttgctagtgaacagaacagactttaggcctcttgaattcattttaaaagtaactacagtccagttaaacaaggtaaggtccacaaaagaaaagacgtttaagcaacattttccaaagagagaaaaaaaaacacatatatgtaaggtttgatgagacaggcagtcctagaaaaacaaatggtacttcaccagatttcaaatgtaaagatttattcatttacaaggaatcaaaagtttgatccaataaaaaggcagttacaataaatctaaagccaatgaggattaagtttgattttttcaagcttgatttgatttctataaaagtataaaccccaaatatattgcttctacacattatatgcacatcagatgccaagtcaacgagtatttcataaatgtataacataaatatttaagaaagcaaaagagtataaagaaaagatgtggcctttgtcttttaaaaacagaaaatctgaataggaaaaaactatacacgtatctaaatctccacacagagataatgatagacgtagaagatggtgtcatgttacatcccactttttcagctcttacagaattgctacagtaattcacaagtatggtgagggagggagagtagctgaaacaggttgttgttgttgttgttgttttttatctgttattttaggttttactaatggaagtattgagactagaacaaaaagcacatactagatagatacttacctgaccaatcctggcaagaggactattgtctcactcacatggaattttaaaaatctgaaagtcttacataaaaatccaggtttccagtttgtcttgagtagtcagaaaagctgacaaatccagccccacattcctatgggaaatcatcagctggtgtgctggtaaacgttaacaactggctctctatagaagaaaaacaaaagcaaaagcccctgatctgtatagcatttgccatggtgtaaatacacccatcatggctgatttcaagctcccaacgtgatgcctggaaatgacaggcacaatcagctcatggacaacagtggccagagctgagtggtggctgccccttggacaggagttacgggccttccgtcctcactgctccctatagtcttacagtggctgctacctgcactggcaccagcccgccccacccctttctctctcttcacccccaagaattcctgagccagatccaagctggtggtagtgctgggcacaatgtcctcctaatcctcatcagaccacatggaaaaatcattgcttaggtaccacattttaggaggggcactgccaagcctgagtaggtaaagacagcaatgagctcagaagacatctccaacacaggatggctgacagcactggagatgttcacaccagatactgaccggggcagtgactctcaaagtggagagagaagagatgatgggtagggagaagtgcaccaaatgaaaaaaaaaaaaaaaaaagaactacttcatccaaaaattcttgactctgatatgttaaattcaattgcaaatgacattaaccatccacaacacttttatgtgtattaaaggaaaatatggatctctaaggattgtgaaacatttgtttaaaggaaacagtcaccctcctcaagtgtctaaacagctattcagtggaagaatctattttcagcatccattatgctaattaacaaggcatgttattttcaccagtggatatccaatttctaacatttattatgctaatttgatctgatataaaactataaaaatagcagagacactggtagtagctgtctctggagggcagcccttctgattaaaggccagatgtctagccctggatgcccccacttagagaatggcttaaataagcacctaatccacctgatgttttatgaagccttttgaattagaatagactactgggagatggtattttttgatgtcattgttcacaaaagggaagcaactgaaagcgccgacttttagaaagaacagaaacatcagtgcttattttaaacctaatgggagcttaggaacatggtccagtcagaggaggagcgctcccctgtggtgcctgaagcactcgactgtccacagctgccgacactcacctgggaactactgttctgatgatcccagcagcaacgcacaattcagtgcgccagcaccaaaggaggaaggaagacagaggtttgtttgggttggtttttttgagggggggtggggggatgtttattttactttaatcttgaattaggcatccaacttctcctaatttttattctcttaattttttctctgatacctcccccacccagtctactgcaaaggctcttgctataagaagtaatgaaaataggccaggcgcagggtctcatgcctgtaatcccagcactttgggaggctgagacagcggagttgcttgagcacaggagttcaagaccaacctgggtgacgtggtgacaccctgtctctaccaaaaatacaaaaaattagctgggtgtggtggtgtgtacctgtggtcccagctactcgagaggctgaggtgggaggatcacttgagccccagggggcggagcttgcagtgagccaagattgtgccactatactccagtctgggcaacagagcaagaccctgtctcaaaaaaaaaaaaagtaaatgaaaatgttttgtaaactacaaagtattatcaaatagaaatagtattccttggaatttgtacattattagtagcaacagtgatctttaaaatgagtcatttctgctagtgtttaataaattaattccttagagataagcctccctgcaggggctacttcattaccaataaatgtttactaaatgcccaccatatgcaccaaatggtagacgattggaatacaaaagcagaagggagcaggattctcgtcctcaacaggcaaggatctgctatagactcacaccatccttcaagtctggccaccctccccatgacactcccttctatgttgcctctgggttatcttgtctctaattaaacactttggcaaagtgggatctcgttacctggggaagcagcccttttcccctgaatcagttcctttccttcagttagctgaggtacttactgggaaagaaaactccatacatatgaaggggagtcctgtggcagcgtgcacctgagccatcacacacacaagagggcagagccatgaacgggggatgaaggactgtccccgagcacacgctaccacacgtcctgaacgtacggctggttacagctagttaatattttggaaatgctattttattggctaggaagccttttccaaatgaaaatctctttactgatagattagtgaaggtagtatagaggagttttattttgtttttgtttttttaatcagcagaaaagtctttcccgtcctctgggcagacagatagcagagaattacgcgcttaggtttcacagccaggctgcttccgttcaattctcagcactgccacaaccagctaagtgtacctgggcaaactacagaagccctataaacctcagtttccttatctataaaatgggactaattatagtacctacttaataggggtgttctgagaactgaatgagatgatactgtaatccttcaactgaggtccccagacaaatgctcaggagttcatgagaaatttttacttttgttatttcatggagaatcttttttaaaatttgacataagcatcctctgaatcagatggctaggtgctatgtcaccaagtattgctgtaagatttcagtgactatgtttgtatttttctggtctaatgaaaaaaggggtcaggcgcggtggctcatgcctgtaatcccagcactttgggaggccaaggcgggtagatcacttgaggttaggagttcaagaccaccctggccaacatggtgaaaccctgtctttactaaaaaatacaaaaattagctgggcatggtggccagtgcctataatcccagctactggggaggctgagtcaggagaattgcttgaatctgtagggcagaggttgcagtaagccaagattgtgccactgtactccagcctgggcaagagtgagacactgtctcaaaaaaaaaaaagaaaaaaggacagagacaaacccaatatataactgaggcatttgcactaagaaatagtcaaattatgtcaccacaacctgtatgatgaaaaattttacaagagtttgcaagatgaaagtggaggggaaattgcattagccggcaagtggcatgataggtagactaacattacagaaccaaatccggcagactggcagcatatgccacagttgtggaacagaggtttggttgcagcagatcttcatctgttgtgtcacggctagcttttattggctatatttagtttataaatgtgtattctagttatgaagttgtaaagaaactgcaagcataagggccaggcccatttttatgctttatatattcaagtaacataataaagataatcatattgtacttacgtaagggaatgttctcattcttttttttttttttttgaaatggagtctcactctgttgcccaggctggagtgcagtggtgcaatctcggctcactgcaacctctgcctcccaggttcaagcaattctctgcctcagcctcccgagtagctgggattacaggcgcctgccaccacagctggctaatttttgcatttttagtagagacggggtttcaccatcttggccaggctggtctcaaactcctgacctcatgatccacctgcctcagcctcccaaagtgctgggattacaggtgtgagccaccatgcccggcccaggaatgttctcattcttaagaaatgcacactgaattctttaggagtaaggaggaatgatactggccacttactctcatatagaaaaataatacccaactatatatacatacctatgtgtgtatatatatataaaacatgtaccaaaagacagagagaacatgtgcatgatgaaggaaataggggtagataaaaacaactggtgaatctggttaaaggacatgtggtagccaaagaactatagcttctcataactagaaggaatgcacttaaaagttcagatccagagttcccctaggaggatcattattagaccagtgattcgtgtggggaaagggacctgatgtcagatgcacctgggaaggctttgtcagaatgccagcaagtaccccgtctcctctctgaggatcgcggatagcagcgagccactcttatggatgaaaatgcacggcacacccctctggtattttaggatatgaaagtaaaaatcactgatgcagtgatcagataagcctccaaactatccgaaatgatcacagaaggaagtacttaatgaacactacagaagagctggcagaaaaacgatccaaaggccatgttatattgagcattatttttagacttaacttttctaaagtgcaactttacaaaaccaggagtcctcgaaatacatagagaaacagacagacataggcgacaaaacaacaactgcatttcccgtttgggctttcctgatgaaattctcccacagttgcacacacagttgctagaaagcaagagtacagtgctctttccctcactaagggaaaaccagactcaacaccaagactccaaggggaatgggcaggaatgacatcagtatgttgttctctttccagggcaccagaggacttggcactctgatcacaagtaaacacaactactccattagaggcagttcctccctattctaagcctttattattcctgggttttagagtcagtactccagaaaatggtcactccctttggtgaaacctatttgtctccctcctgtgctctggggcatgcctgcccctttgctgtaccatgcctcaatcgagtccaccttgtagatgctgatctactccggcatgtctgaatattaccggctccttttattttcatggcccacgtggcagtcagatcatcccagtgcatacaacggaggagccaggagtaaagtttatcacacgaaggagatgtaaaccaaatcatgttttttcaaactgtcggttccaatgtgttagtggatcctaaaatcaatgtaaggagccatgactcaacttctatttaaatagagtgcaaagaccagaaaagacacatcaaactgcactgtgcaaagtaagggtaaccattgtctcctctttttatttttttaaacatattttagagacagggtctcagtcgtcgcccaggctggagtgcggtggcaccatcacagttcactgcagcctagtactcccaggatcaggtgatcctcccacctctgcctcccgagtagctgggaccccgccgggtatgtgccacccatgcccacctaatttttaaattttttgtagagatggggtctcattttgttgcctacgctggtctcaaactcctgggctcaagtgaccatcccaccttggtctcccaaagtgctgggattagaggtgtaagccaccacctgagccagtactgtctcttaaaacttttggattggttatctcagtatatgtatatgaagatcacaatatgaaatggcttttttgagatggggtcttgctctgtggcccaggcctgagggcagtggcgcaatcacagctctctgcagcctttaactcctgggctcaagccatcctcctgcctcagcctctggagtagatgggactgtaggcacacaccaccacacccagctaattgtggtttttttttttttttggaggatgaggtcttcctatttttcccaggctagtctcaaactcctgggctcaagcaatcctccctcctcagcctgccaaagtgctggcattacaggcatgagccaccatgcccagcctaaaatgcttttttactgtgtgccacagtcaaccatattcaaaagccacagtattagatgctgagagaaaaggagagagaaagagacagaaagatcaggagtgggcccagctgaactagtcacaggagcaaaccccataagaggttcacttggctgatgcagaagccgaccagaagtcaccatgatcttgaggaaagaaatcataagagaaaagagtatatgagtgcaactaaacattacgttatcattaagctgacctggtttgctttcctttttttaaggcaaatgtagactacagcctagaaatataaacatattccatacaagagggccatgtgtccccattataataaaagcttgggttcttaggaatgcttacttgaaaggagtatggtaatcaatgcttcatcaattagtcaaccttcaataatcatctccaaacaaggagttagtgaatttcttggggcagatgcaaacgcaacccctgcaaaagctgctgtccttgccacatcactcacaccagccccatccagccttgctgatcatctgcatattcattcaaaagcactattccctccaccaaaaccctcaaagttttaatttaaagttattttaatctaagtgaggaagtcagcggatgcaattagatcttaaaattagaagatatggttaccaaacttaaccattttgtaaacattgcaataaaatggaatatcatgttaaagacatgccaaggtgttgttttatacattagcaccaagcaccttgccctcccattttcatcaatttaccctatgaagaaacagctggaggctggcacagtggctcacacctgtaatcctaggtgtgaggattattttgggaggccaaggcgggtggattgcctgagctcaggagtttgagaccagcttgggcaacatggtgaaacccctcctctactaaaatacaaaaaattagctgggcgtggtgacacacgcctgtagtcccagttactcaggaggctaaggcacaagaatcatttgaacccgggaggcagagattgcagtgagccgtgatcgcaccactgcattccagcctgggcgaatgagcaagactctgtctccagaaaaaaacagctggaaaaaagctgggacttcccagcaccagtattaccaatcactgaaaggagaggttcctcaagcacaaggaagaacagcaatctcaagttgtatttccattcagtaccttccagggttaccctagacactgattacatcaatgtctcatgagcagtggaatgattattttaagtaaatttatcccttccaggccatccagataagcaactattgtgttactacaaaaccaccattttactatttattttagctctacagtgtactattgaaatatttcttttattctccactagtagacatactgaagccttaatactatcaggtattatagactcaagtcataataggtactgttcccttcaaaatgctgaaacaataacatcctcaaaaatccccaagttttcagttctccaggagcaaaggaaaagagaatcatttaggtcaccttgatgagctgggaaactgatctcaagtagtagaacatttttctgtttgtaataagaggcccaaatcagattacattcacaaggcttttttaaagtgttgaggagaacgttaacctcccctaaagtctgagagcaatttacaacaaaagctaaaatagaattaatgtagggcagagaaagctgagtcaggctgaatcagcccaagtaagtctaagaaatccactgaaagacatcgaaacctaatgttcaactttgtctataaattgtatgacttttcacacacttacataataatacataactaatgaattaggtaacagaaaatacaatgcctggttttcgagctcagcatacttgagagtggtacacataacacaagagtaagaaaggtttcccaaaaatgttaataataattgaagacatctttggacttttttcctctcattcaaatgtaaaaaatgatcctaagaagctgaaaccatgatacagggattctagaattatgccagcccatctctaaagcaactggagtcatttgagtcaaaagaatgttcggctaggcatggtagctcacacctgtaatcacagcagtttgggaggccaaggcggatggactgctggaggccaggagtttgagaccagcctgggcaacatgatgaaaccccatctctacaaaaaaaagaaatagaaaaattagctaggtgtggtggcacacgcctgtaatctcagctactcaggaggctgaagcaggaggattacttgagcctgggaggcagaggttgcaatgagctgagatcatgctattgcactccagcctaagtgacagagcaagttctgtctcaaaaaaaaaaaggagaatgatctaggataaagtctacagtctattttctgattgttagagccttataagcgaatttatcctcattcttcaaaaacaccaatgggctgtgttcaacacagaaggaaagtaagagttcctctttcccttagcagtatcgttttgtttctccgaaaacagctctcccaaaccataggttccaaagggagtcttgcatctacattaccagctgtgcttgtccccacttctatacattttacagccataagcgtctgcacacaaacatattcatgagtcccatgaaggcaggaactgtcccttctttatctttatatgccccttatatataagggttcaatcatcactcactaaattggaaactaggtaggcctccaactggaacagaatgatcaaaagaggagacaagaaagtctttactctccccacttaaagacacaaaaggttaccctgaggtaattatttctatttttcattgtataaacagtattttgttttattattcctaactaaagttgggcattgtaaaagagagaaattcaaactactaccttatataaaaacttctaaactgactatattggcgctcaacaaagtctgcaaatagctattcaaatcagccacttctccagggtcgtcactgctccctacagtcttacagtggctgctccctgccctggcaccagcccgccccacccctttttctcccttcacccccaaaaactcctgagctagatccaagctggtggtaggcctgacacgatgtcctcctaatcctcatcagatcacatagaaaaatcattgcttaggtaccacattttaggaggggcactgccaagcctgggtaggtgaagacacagcaatgagctcagaagacatccccgacacaggatggctgacagctctggagagaggtgatatgcaattgtagaaagtcatatttcttgcaatcttagaggaataaaggagttttgttgttgtttaggtaaaaagccttcggcctgagctgcctctcccgagctccaattcctcagattcccatttaacatccttgaacttcaatttctttagtaaggaataattatacctcaccatcaggtggttatatcctcacaacaatcaaaagctaagtaagtgtgaattatacaagaggttgaaaaaaccttactagatacctcacgcaatcactggtagaatgatgatcttgtaggggtggtggcaggagggtgggaagacacagacgcatgatgataaggtttggatatttgtctcctccagatctcatgtaagaatgtgatccccaacgttggaagcaaggcctagtatgaggtgtttgggtcatgggggtggatccctcatgaatggcacggtgatgagtgagttctcactctactagttcactcaagagctggttgtttaacagagcctggcacctcttcctctttcttgcccttcctctcacatgtgacatgcctgctctccgtcaccttctgccaggagtaaaagctctctgaggcctctccagaagccaagcagacactcatgccatgcttgtacagcctacagcaccgtgagccaattaaacttcttttcttaataaatcacccagtctcaggtattcctttacaacaatgtaaatggactaagacacatgttaatacagaagactgggagaagccctatcagaagccaacaatgtgccaggagagagggcaaggcagtcccaaccaggagtcaaaagctaatcagtaagctcagtacacacgacagcccgttaatcctcatcaacactttgtaggtaggtattgttgctccatgttactaatgagaaaactgaggcttagaaaaataaaagtctaacagccagtagagaggtagacctcagattttaagaacatacacttgctgtctgccaatccaggaaggactaaactggaaagagctcatcttcgagaacttataatgtataaaacgtcaacctaaatttttttgttgttattaatattttagtgcttagaaaaagaactgttcctacatgaaacagtaattcttacaatattgtttagcaagtaatcttaactttgaacaagaacgtttaaaaataaatatattgttgggtgagcaggaaaatcactttaaaatgttgtagaataatcttccaatattgttcctttcacccatccctcaaactacactaatgaacattttttttctcccagtatttgctctttctcagcaatgcaaacataattttcatgactgttttccattatgacacatactgtacatttccaacgacataaatgacgttcgatgattttttttcccatctctagctctctgctggtcaattagtctatcaactaacacatatttatctcaacatctgagacacataaggagtatcttcattccagatcactgatagtaacctgagaaggaaagaacgacctacaattaacggttcaaactctagcatacaaagttaaaatactgattaaggccagacgtggcagctcccgtgtgtaatcccagaattttgggaggccgaggtagacggatcatttgaggtcaggagtttgagaccagcctggccaacatggtaaaaccccgcctctactaaaaatacaaaaaaaaaaaaaaaaaaaaaaaattagctgggcattgtggcaggcacctgtaatcccagctacttgggaggctgaggcagcagaatcacttgaacctgggaggtggaggttgcagtgagccgagattgcaccactgcaatccagtctgggtgacagagtgagactccatctcaaataaataaataaattaaattaaataccagttaaataccagtacccacacttgagtccacgagtttgaaaccagcctgggcaacacagcatgatcccatctcaaaaaaaaaaaaacaaaaaaaaaaacaaaccagtatccatagttaagtgccagttaaaagacttacatgttcttgaaaatacaaatgaggatgtgaagctgttatctctaaggaaaaccaccaaaattaacagcaaatagccagaaaaccatgtagagaagcatgtaattttgttatggagcagaagacaagggatcattaaagcacttaagctattttataatagactcctcacttacgtttttcgtcatcagcatgcaccagagatgctgccctggacaaaacatccaatggcgtctccattcctggttggagcctaagaggaaaaaataaaaggggaaaaaataatttaaacagaattcaaaagactcttagaatcctagtcattaacagaatgagtcctcaaccaaatgcaaatcattcttctaaggatgaaattcttcccacatgaggaaacagaatgggcttggttcagggagagagaaaagggttaaactccatttagtctactaagctaaactttgccaactacaggaagcagctgatgtaggaactaaaagaagggatattgtgaatattcatgcccatgttatttggtgcttatgtttatgtgcatgcataacatgcctgtataaacatgcccaataaaagaaaggttttcagaacaacggctgctctatgaacacagcatcactaccagtgaggtggtgcagcttaacacacgccacgtactcatggaaagctgtgtgagaaacccactggtaggttaattgatattttaagtccaataagaatctttatgttaaaacgtcatgttttgtataatggtatattatataatcaccacctatcatcaatttatctagcatcatgttttttaataagactggatttttattgttgtttccttaaattacagcatactataaaagctaaaacagcaaaagatttaaagctcgaggaaagccctggaaaaccagaatgctttttacccagtttcccttttctgggttatttaaacacacacacagttactggcacacacaccctactagctcaccagctgagaaaaacaactccttaactgtaccactttacagacacttggaatttattcagcattcttcaacacttatggagtacctactacgtatgcaccggtcacaacatgtggcagaccagcttttctttgtaatattcatacctcaggcctccaaagaaacactgatccacgaggcatggtagctcacgcctgtaatcccagcactttgggaggccaaggcgggcagatcacttgaggtcaggagttcaagactagcctggcgaacatggtgaaaccccatctctattaaaattacaaaaaattaggtcgggcgtggtggctcacgcctgtaatcccagcactttgggaggccgaggcgggcaggtaacctgaggtcgggagtttgagaccagcctgaacaacatggagaaaacccatctctactacaaatacaaaaaaattagccgggtatggtggcccatgcttgtaatcccagctactcaagaggctcaggcaggaagatcgcttgtacccgggaggcagaggttgcggtgagccgagatcgagccattgcactccagcctgggcaacaaaagggaaactccgtctcaaaaaaaaaaaaaaaaaaaaaagaaaaaaagaaaagaaaagaaagaaacatagatccctgatcatgcaatatgacttcattcagtaaacgttaaatatctacaaggagctccaggcgggaaaaataaacaaagcccagtagctgccttcgaggagctttcaatctgcacgggaggcaggccaccgagacatctagtttaaggcagcattcttccaaagcattctgcactgggtgttcatattttgtaagaaaaaaacgtttttctatggtaaataagtttgaggaagcctggagtaaaccaagctaagcagcgtattttcctccccgtgcctttaatctcccgttgtggggacagaaagccctgtacacgcgaaacctcgtagacgtcatgagccattttcaacccaaaacgcatctcagggaacatctggggaaaatactgggttagggcaaaatgtgcaaagcgtcaaaacagtgctagaaacaaagtcctacagaaataacagatgaattctgaaaggctttgtgaagaaaacagaacttgagcggaggctttgaagaacgaatataaaagttcctcccccagaagggaagaacagaagcagaatcggtttaacaacacgctgcccaaatcgcctacaagagtaaaatggggacagaaagtaagcgacaaggttggaaatttagattgggaccacatcgtgaaaggactgagggcttcgatgggaccgcggcttgacacgcattaaggagccactgaaaactccatctaagcagaaaagcggcttagtcatccatgcgttctgggcaagttatcctggccgcaccacgtggaacggagtagatagagctcgggaagctgagcgcagggcggacaacgggaaggccagagccgtgggcaagcacgcggagggcagcgaggggcactggcaccggagccgcggggaggcaggaaaacgcagaggcggagctcactgagcttggcaggcagagagaggaggggagggccacggaagactaagagtggcagggaggcaacgacctcctaacacacgcacatgtcttctttttcagagaggatgggtaaaagcagcggtctaagagggaaaacctaacagtgctcacattcctgatcttctttgtaaaaacagaaaagaccatctcctaagaggaaggatttgtgaacttgttcaacaatggagaaaaccaacaagaacttggaactgactaacagaaaaaagtctgctgaactcccaagaactaggtaatattctcttcacccaagccagcttcctattcaggaaagatctgggtttaaagtcttgtgatttggtcgagaccatcctggctaacacagtgaaaccccgtctctactaaaaacacaaaaaattagccaggcgcggtggcgggcaccgtagtcccagctactggggaggctgaggcaggagaatggcatgaacccgcgaggcggagcttgcagtgagctgagatcgcgccactgcactccagcctgggcgacagagcgagactccgtctcaaaaaaaaaaaaaaaaagatcttgtgatttggggtagtaactgctgataagcatcctactttgcaataatacagcatttagactcataattctctaaattaattttaccccattaagttgaaggacaatgctttcaaaattctagacctaaatagattaatacataccttaggttatataaagtatgcacagaaacaaaatatcaaagcataaaagtatcaaatgacataaggtagacccagaattctagcatagcggaatattagacatttaagtttatacagatgctatgaaatcctaaacccccaagcaacttacattcaaagtaggtagataagataatgggtattaaaggttcatccacaaggcacctgccatctgctgcaaccttattaatgaaatcaaccaatgtttattacacaattattctaagctcagcaaagtgcccagaaaaggttaaggagaaacagaagatagatctctgctttcaaggagtcacgctcttgttcggaaactaaattttataagataggataatgacaggcaaaatcaaaaagaggataaacaaagactaaatattatttaaaactaaaatgggtacagtgtcataaaagagatcaatgtcagctaacgtgtttgccttgtgcacatctattttttgtttgggggtggtttgtggatgcgtgtgtgtttcaaaaagccacttggaaaatttccttccccggttgccctgccccaggcagtcactctcctctctggcctccctcaccttcctggatcgcactgtgtttctgtatacttcctaggtgcaaggaccctgtcttatccccagtgcagtcatcctgagtcaacaacagtctgagaaaaggcacaggggcaggaatgagcacctgggacaggtggccagacctgactagctagaactgaaaatccacgttaggaagcagcagaagctaaattcaggtgagcctgatgcgggtggccttaggaaagagctgacagctggccttcaggttgatacttaatgtcacaggcaacaggcagttgtcatcatctgtccctgagctggcccgtgacatgatgttcacactattttagtttagaagttccatgcgtctaggcatgtggctcacgcctatagtcccagcactttaggaggctgaagcagaataattgcttgagctcagcagttggagaacagcctgggcaacatagtgagaccccatttctaaaaaaaaaaaaaaatttaaataaaaaatgagctggaagtggtggcatgggcctatggtcccagctactcagggagctgaggtgggaggatcacttgaccatggagggttgaggctgcagtgagccgtaattgcaccactgcactccagcctgggcaacagagccagaccctgcctcaaaaaaaaaaaaaaaaaaaaaaaaagacgaagaagttctgtgtaggatggtttgactggagagggtgactccagaagttactggaggtggatgagttaagaggcttctgtaggaagcaggtgcaagataaggacaatacagctgggacatgagggacggggaccaagcattatctagccatggaagaacaaagcaaaggtggaagataacagttattaaaaaaaaaaaaaatggtcttccaggtgggtgtggtggctcagccatgtaatcccagtgctctgagaggccaaggcaggaggatcgcttgagcccgggagttccagaccagcctgagcaacacagaaatttggaaatttactcatttctacaaaagattaaaaaattagccgggcatagggacgtatacctatagtcccagctactcgggaggctgaggtgggaggctcccttgaagccaggaggtcgatgctgcagtgagctatgatcacaccactgcactccagcctgagtgacagggtgagaccccatctgtaaaaaacaaacaaaaagtcttctgcattttatgtcttatatacatcctatccacagcactaaataaacccaataaaacatattgataatgtgggaggaaaaaccatggctacagtattagatggaggatcacaccacattgacaggcaaatcagcatcatgattatttcagcatcaaattagcatcaggattaatatgaatccaggtaaaccacttccaatctatgtaaccctgggaaatgacaacctctgtgtgtctatttcctcatctggaaaatggagatattaatattacctccctcatacggttttctgagaagtgaatgggccttataggtattgaaataattatttgccaaaacttatgcaaatatattgaataaatcacaaatgacagtaaatgtactgaaaatgacagggcactgtccactactttagctagcgtggtctgggaagatttcgctgaagagaagaatggaagttgagacctaaagaatgagaagaattagacccagaaagagcagggagggtgggaaaaggtgggagacagcagcacatgctgagaccaacacacaaaaaagctgggcaggtgatgtggggggcggccagggtggctgccctgaagtcagcaaaagggaggcctgaggtgggcagcacagggccaggtcacgtgtgcctggagggcctgcaacaccgatattttattttaagtccgtgaaaagtcctggaatggcccgaaaagcttcaagcaaggaagtgacaagtttattttatttcctttatgagccacaaattatcctctaccttacacaaaaaattatgctgcatctgaaaaacaaatctaggtctatcccaataatgtcttatttctgtggtagttttgcattaggatatagtgataaccaaaaataatccattgaggaccaggcatggtggctcacacctgtaatcccagcactttgggaggctgaggtgggcagatcacttgagggtgggggttcgagactagcctggacaacatggtgaaactcagtctctactaaaaacacaaaaactagccaggcatggtggtgatggcaccggtaatcccagctactcaggaggctgaggcagaactgcttgaacccgggagacgggggttgcagtgagccgagattgggaaagtgcactccagcctgggcaacagagtaagattccatctcaaaaataataataataataatccattgaaatgctgacacctggaacataacaacatttaagtgagtggagtgtggctctagaaaaagatacagagggccaggtgcagtggctcatgcctgtaatcccagtactttgggaggccaaggtgggcggatcacaaggtcaggagttcaagacgagcctggccaacatagagaaaccccgtctcttctaaaaatataagaaattagccaggcatggtagcaggcacctgtaatcccagctactcgggaggctgaggcaggagaatagcttgaacctgagaggcggaggttgcagtgagccgagattgcaccattgcactccagcccagggaacagtgcaagactccgtctaaaaaaaaaaaaaaaaaaaaaaaaacagatacaaagtacactgtgtgctccactgcactgcaaaccagtttctggtctatctattcacctttttcgtggttgtcaaatgtgaagttaattcatcatgaatagacatatattttgttgttgtggatttttttttttcaggtaatggtcatatattttctctgccagtccacatgcctttcctcacactcccttagcctcaattcatatgttcttccaaataactaaaggttgagaattagggaacaagaggtatcgattttaaagctacaaaaacttaggggcactcagtgctaacggcaagctcagctataaatctgacagccattttttggccttccacaaagaactgtccctttttagtcaacaaggggacatgagtacctatcttggtgtgttagtccattttgtgtcactataaagtaatacctgaggctgcgtaatttataagaaaagaggtttaactggctcacagtagactgtataagcatggtgccagcatctgctcagcttctggtgagacctcaggaagcttccaatcataatggaaggcaaagcagaagccagcacatgacatggcaagggcaggagcaaaagaggcaagaaggtgccacattcttttcaacaaccagatctcccatgaactaccagagaactcacgcatcaccaaggggatggcactaaaccattcatgagggatcgctcccatgatccaacctctcccaccaggacccacctccaacattgaggatcacatttccacataacatttggaggggacaaacatccaaaccaaatcacttgggaacagcactgtggggtatattagattatattgtttttcaagcaatggaacacaactccaaaatatgttatggaagttttccaagaagatttgcacaataaaagctacagcaccaggcatgttcactccatgtctgtcccatggcagtggctagatatgatatactttaggtaagagtacgagaacatggagcaactaccttgtctagatgtggaggccaggggggtgagcatcggaggaatcacattcaaactgccaggtgttcctgccacacacagtaacagggccaaaagtcagaaacagacagacatcactatccttaaacacctgatggcctctccaacttccagatgcacacaataaaataccctaattcctgttggccctgttccttcatgagtccaaactctggcctccccaggaccactccctgagctaaaaccaatttggtttcagctaataatatacaatggtaggacaaacccaaaagtatgaactatcacaccatggcatggggtgtacttcttggccatcaagaatttagagatgtggctgggcaccgtggctcatgcatataattccagcactttgagaggctgaggcaggcagatcacttgaggtcaggagttcgaaaccagtctggccaacatggtgaaaccccgtctctactaaaaatacaaaaattagctgggcgtggtggtgagcacctgtaatcccagctactcaggaggctgaggcaggagaatcactcgaacccgggaggcggagtttgcagtaagctgagatcgcaccatagcactcagcctgagcaacagagtgagactccatctcaaaaaaaaaaaagaatttagaggtggctgggcacaatggctcatgcctgtaattccagcactttgggaggccgaggtgggcagattacctgggcccaggagtttgagaccagcctgggcaacatggcaaaacctcatctcaacaaaaaatacaaaaattggccagtcgtggtggttcacccctgtaatcccagcactttgggaggctgaggcgggcagatcacaaggtaaggagatcgagaccatcccggctaacatggtgaaaccccatcccggctaacatggtgaaaccccatctcgactaaaagtacaaaaaattagccaggcatggtggcaggcacctgtggtcccagctactcgggaggctgaggaggcagaagaatggcgtgaacccgggaggcagagcttgcagtgagccgaggttgcgccactgcaccctagcctgggctccatctcaaaaaaaaaaaaaattagccaggtatggtggcgtatgcctgtagtcccagctacttgggaggctgaggcagaaggatggcttgagcccaggaagctgaagctgcaatgagctgagatcacgccactgtactccagcctgggtgacagagggagaccctgtctcaaaaaaaaaataaaaaagaatttagaggtatttactgggtatctcctctattaaaacactgtatttagacgttacaaaaaaggaaaagtaaactccctgcccttgagcaccgtacaccaaatatggatgatactgggtgatacactggctgtcaggctcagtgagaaggaaaactgaatgagaatcagaccaaatgtcaccagattctggtggcgacatgcaagcacagtttcacggttttaaatcctccagctctttctcctccccagagtgtccggtgatgccccaccaacttcgtgcagcacatattcttcctgttaacatcccattctcaaaccacccctctctgctcttcttgctaaaaatatctctcatttgagtaatccttttttcttctcgcactttaccatctgttaagtcaacagagccaggactttagcatcaggaagcccaagtttgagccctactttaaatctttcactcattcagtcaacaatccctgaaagcctattttgctctaggctttgccctagatgtctaacacttaattgtatgggccagtcatttaccctctccaggccctagtttcctccttaaagaaaaaagtaaaaaacattgcctaactaacttcctatgatcacaagcttatcacatagattaaacgatgtaactgagaatgtcttacaaactaaagagagaaacagattttattagtctaccaccaccatcttccaggtgtatagcatacatgttttcaaaatacattcacataaatgacctgattggattctcacaatcaaattattacttaggccaaatggccaaatatgattattatttttcttctacagattaaaaaaaaagaaaaattgaggcaccaagaatggaagtgacttcctgaagcaactaagactagaattcaagtctctcaattctccctccaatgctatttttactactcttaagttgatcatgctaaagaggttttagtgacaagcacaattatttagcctaggtcaaagcaaaccttccattagcaagcacgacttctagccctgtgctctttcctctacaccttgagatacctatcaggcaataatgtgaccgtttcaacagcgagcaaggggaagcaagcccttacccgtcaggaacacgcaaaccatggtatatttgaaattcttctaacagaggtaggcatggagtcacattaatagtaaccaaggcaggtaagaaaagaagactgtcacaccaggtcaattgatgctgagactgtggccaacaatgacaccggcaacaaactaccaagacatagcgatttctggggccacagccacagaggagtcaagctaaaaccctgaggactttgagatccacgaacaggtacagtagtaggaaggatggtgtcaacttcaccatgctcaggaagacctgtggtcaagctccaacggctaactgttaaggttcagtgagaacatttttaaaatttcaccttggtgctcgaactgctcacaaccttaaattgtatgttacctttctaaatagaagccagcccttattcaaaatattctctcaatagtcatattatcaaagaaagagcatgaccagacggatcatttgctattccagctttcctcacagaggcatgtcccaagcaggtataactgactcacgctgccgtaatttgaagcatcaatgccagaagaacttggctgcttctgcttgcgtcaaattccttacttctacacatgatcactcctgaaaattcattagaaggccaaacgttctaatatttgaacaatatatcttcatgttctatatctacctcctgagaactgtgtgtatatatattatttatatatatatatatatatatatctgcataaaatccctaattaggattttttcaggtacctgccaacctcaagtgtgagccccagatcacaccctttccataaggcttagcacccctcctgtgaaacctctgcaggagggaggtctacaggctgggcagctgtcaatctcttaccctccaatgtaggctggaggctgtatagcaggaacaggtaaccttaggtgcctccacctcccatgacctcaacagaaagtgagacccccattaactcagaccaaataaagggctaacactctggatggaaacactgaatgaatgctctgctcaaccactcaaggtttcctgatgctaacgtggctcagggcttgagtctataggacttctcagccctgcaggagggcaggggtacgatacttagtcatcacaactaccctggcaacaggagctagcagatagtgccaccacacagtgacaaaaatcctcggttattgtaatacagtttggtatcagtgtaaactatacaaatgcacagactgtatgaaagttgatcatgtacccggtgaggtacatctatacaggctctgggctgcaaaacccaacttacattacaacacatttcacggccctatgcaatgctgcctgatgctggtgcaaaattcttactgctggctgaagtccacccatctccctaaagtgtcccatggaaagtgactatatggtgggcccacactgaaactactgttatctaagggggacaaataaaaatcaagtctgaactttctgagcagactaccaattcccaacatttttcaacactgttgtcagcacaaataaaaatgaggccaggcacggtggctcacacctgtaatcccagcactttgggaggccaaggcaggtggatcgcttgaggccagaggttcgagtccagactggcctacatggtgaaatcccatttctactaaaaatacaaaaaataaaataaaataaataaataaaaatacaaaaaaaaaaagaaaaaaatgaaccatgtttttctttctcattttaggatattatgaatctctctctcttcattttcaagaccgcagccttatacagcaaggcatatgaaataacagaaactctttggcatttttagtttcctctggatatgcttgctcttgcatttatttgaagacttaaaatttgaatacttatgtgaatagttagtatttcctattcacaagtgctaaagcgacacatattcttagggacctattactcccaagaataaaagatgaatttgggctgggcgcagtggctcacgcctgtaaccccagcagtttgggaggctgaggcgggcggatcacgaggtcaggagatcgagaccatcctggctaacacagtgaaaccccgtctctattaaaaatacaaaaaattagccaggcacggtggcgggcgcctgtagtcccagctactcgagaggctgaggcaggagaatggcgtgaactcgggaggcggagcttgcagtgagccgagatcgcgccgctgcactccagcctgggtgacagagcgagactccgtctcaaaaaaaaaaaaaaaaaagatgaatttgcatcacagcccaagttagcaagcttcccagaacagcccaggtctaactctccatggttccaaaataaaatctcagccctcagcctattaaagccacataaagtcatctaattaatgacacagtgcaacattaggtagcactgtagttattaccatcagtaaatattattggttcttttttttattttttgagatggagccttgatctgtcgcctaggctggagtgcaatggtgcgatctcagctcactgcaacctccactttccgggttcaagcaattctcctgattcagcctccctagtagttgggatcacaggtgcccaccaccatgcccagctaatttttgtatttttagtagagacggggtttcaccatgttggccaggctggtctcaaactcctgacctcaggtgatccacctgcctcggcctcccaaagtgctgggattataggtgtgagccaccgggcccggcccagttcttgttattcatagtagttgtgttctgtaaaatctctgtgaacattgaattagtggatattgaaccagtgttcctaggggaaatgagagtgagattccttccggcttctggtcacatttttgcaaactgatcaatacacaaccttgttttacgtatgtttctgtttaaagacaccttatttaatacctattgttgattcattaatgttgaactcaaggccaacagcaccgtaactcaagcctgaatgaagctcatctaacatgtatattttctccatgaggctcatcacagccttcttggctgaggaacattagacagcattttagcaccatacttacgggccactgtaaatagcaaaatccccaataaaaagcacaaaaatgggcagggtgcagtggctcacacctgtaatcccagcactttgggaggccgaggcaggcagatcacgaggtcaggagttcaagaccagcttggccaacatggtgaagccccgtatctactaaaaatacaaaaattagccaggtgtggtggtgggtgcctgtaatcccagctactcgggaggctgaggcaggagaatcacttgaaaccggaaggtggaagttgcagtgagctgagatcgcgccactgcactccagcctgggcaacaagagtgaaactctgtctcaaaaaaaaaaaaaaaaaagcacaaaaatatataaaaacatgttactaaatagactgcaaaaagcacacttgtttacagcatgagagctcaaacaagaaggcagggtagtgccttgtctgagctctactgggaacatgtgcattgggaggctcaaatttttccccatactgcacatgtccacaaatgtcgaagaaagtgtcagaggcattgatttggggcttacaaataaattttagtgagtagacaaatttataaacatggaaccacgaaaaatgaggatcgactatatctggctattagacctgaggcatgagacacagaaagtacattctacaaagttttctctctttgcaaaagtgctattattctgtatttcaagaaggtataattgttctggttttagcacctcctacattccttttcctaccttggcagtttgtatctgccaaatcttgcatcaagattttgcaatctagttcttatgatactgggtttttttttgcgggggggtggtttatgtggacagatcctaaatgctacagattagcagcattcactttactcttctattaaacacccacccatagcttcattaactttaggtgagttccctgaaagaagcacaaatgagcctcagttaacatacctcgaagaaatttcttaactcacacacacaaaaaactttctctttcaccaggttctcatagctgcaacagctcatctcacacaagcaataagcagacacattggtatgttaaaatcaccacaccaaaacaagaaggcaataccctgccttcttgtttgagctctcatgctgtaaacaactgtgctttttgcagtctatttagtaacatgtttttatatatttttgtgctttttttttttttgagacggagtttcacaatttcagtgacgttaaaattttcccgtgtattttatttttccttcctgagcttacaacttttagtacttttgttaggtcatgttcaaagttacaaaacaacttttattgttaacctactcattattttactaaggcaaattaaaagctgcacagcaaaactctccaagacagatacctagaagagacacgaaataaactctccctttggatttgttttggcaaccaccagagactggtaacagggctgcctccataaggagttaagaggaatttcccactacagattttttttttttttttttttttttggtacagttgggagccgggagtctctctgttgtccaggctggtctggaactcctggcctcaagcgatcctcttatctcagcctcccaaagttctgggattacataggtgaaacaccgcgcccggcccagaacatttaaaagtgaaagtttttacataattatcatgtctgtaagaagtgttaaaatcttcagataaagtcataattttaaatcagttgggggatagcagtaacaactgtgtttatgtagctctttcaaagcttcaaagaatttataaataacacaaaatactttcaaagcacattattctctgtaattcctgaaactctgtgatgtattggaactaatattaccacccttttacaaaggaaaataagatacaaagtttgagtacgagtaacatttctggtcataaatctagtcagtgacactgataggactagaactcaagtctccagaaataataacccagagctgtttttactacaacattcacagttttggaatgtagtccatagttatttatagcagaattatcttcttaattgtattgtgttttggtcaacataaaaattagtttgcattcacttccaaatggaaagcaaaggcaggctgcccagaagtgtgaaaaaacggtggccggggaaattagcctgggattaaaattttgccaaagttaaacaacgaattgaagggtttacatcatttccaccgtgggggagatgacttttcaggccagatgtaacaggaaatacaagaaaaaattcaaaactgtcttgagtgtaagacaagaaacttctgaatcaagtatttctaaatcctttatttaaattgagagcattgggacttagagataataaataacttgtcccaagatcacaccacagggacagctttactgctccgaccccaaaggtctccttaaactgcccactctactccctcccagtcatgcgcagactcttcattagatgcaagcaggaaacaatgaacagtacaagtccgtggactcagcgagtagagaaagagttaaagtttggtatgctaacatggtatgcaaaactgaccttcaaatcctaataggcaaattaattttttttttgtctttgactatttagaggaaacaactgccagactccttctgagtagaggtaggcttgggtatagaacaagatattaaaactccacaaactgggagacagtgcctttcaaagagagggcaaccagctgttgataaaacccagcagaaccgcctccacttccccacacccctaccctcccgcgccaggctgctggttcttattaatcacagagaagggactacaactagcaaacatacagcaccgacgatcaaagtgaaaccgattttttaatcatctaacttaaacagacgaacacatgccagcaacgtacataaatacgaatagccccagcaagcactgtcttcataacctaagacagttaaatgtctcagggtgatgaatcaaaggagacttcaagcaaaacaaaaagcgaacagccctgtgctcttccgcgaggcctgcactgggtgcagggagagtgtgcagtcctgttttggggaccgggcaggaagcacaggaagagtacggtgccccttcccgcagtccacatcacagccctccctgaggccggcggggaccgcggggtgccaggcgcgggcctcctcgcccgccccgagcctccgactcccaggacgtcctccgggagcctaggcgcttccgctcccaccggcgcctcccgagcggcccggcaaggacccgccacctcctccctcccgcagggcatcccggttctgctccgacagcccaccccaaggcccctctcaggccagccctcgcccagcccgggtcccgccccgccgaccgggtcaaccgcactcaccgcccggcggctctgggcgcgcccgcctggggccggcctggccctgcgggggacccaggggcggggacgggacctgggcacgcggggcgcaccccgagggcgcgcagacgcacaggcgggctcgcgcccgagcccccgcacgggcccccgccaaacacgcacacgcacacgcacgcgcggaccgggccggcggacgggagcgcgggagcgcgaggaatccctggaatgaggcaccggccaacctgagccgggctccgccaggccagccaggccacgccctcggtcacgcccctcacggagcaggtgggggctgagccaggtgagccgggagggagataggggcgaggcctcccgcggcagggagaggccgctttccctcccccgccagctgcgcgcccggtgccagctcgcacctcccgggccgatgccggcgcgctggggcagtgaggtttgtcggggcgggcgctcccgagaggcgccagcgggcagggcgagtggacatggcgcacactgctgtggacacggcatctcgcacgcccccgcccccgaggccccgccaggggacacagcgccgtgcaaatgtacaaacacaaacgcacatttcgtgcgcgcccaggtgcccgccgcgctccccacgcgcgcacagtaggtccctgctcccgggggacagcgcacgggacgccgacgttcacagtccaaccagacccgtcccgcggacctgctgcccttcccgccacacacaccccgccaagcgcccggagttcagccgaacctgcggcacccacgccgccctccgcttcccccggctcgcgagcagccggataagggcgcaccacccgcccgcgccggttcgccgtccacacccgctcacccccggaacgcggcgcaccttccgtcccccgcctcccgggccccgtcgccccctctcggcacccgcatgcccgagccgcgctccccgacggccgacggccacgcacctgaagggacaggtcacaccggctgcgggaggggctgctcggcgccactgcgctcagaacggccgcggcggtcccgggcgctccgacgccgctgggtttcctcccattacagcatgttgcactccagcgctgcacttcacactcgcacacgcgcacacgcacacgcgcacaactccaggcgctcggcggcgtccttcccccgcctcgcccggaggaggaagtcctagtaaatcaaaacaggctgggagggagggagatcggagtggaaagagtccccttcagccgctcacacaccagtgtttgctgtgtttggcaaactcctggcgtccacaacccggactgctctgaaatgtgcccggggaggggcagggaggaggaggtaaaacgtttctaattggcgcaggttcttatattacagcagcagggcagacatgtgaccacgaaaagaaaaggcctgtctttaattttttcctgtctttctctggggatttggtggtggggggccgggggatagaggcctgatacccgccccccgccatccccagcaacccttgccctgttgttttcttgtactgccacaattaagaaaacatttgcttaacatatccagcggctaacttcataaaataaatagagactggacttcctctggtttgctttaaaaggcttcatgttgcttgccttctggctgttctcaaacctcagtcattattaggagcccctaccgtaagggctttccctgggagagggctctgctgaaagggaatgataacaatgaaaacaaataccagcttacattcgtgctggaaaaaaaaaatgctttgcagttttcaaactgttttcccatctgttgcctcatctgatcatatcaaggaacagcacggtgtctcactggatcttagcccctgttggatatgcaaagacaggtatgcgtagttccatgtttcagtgagattaaatggtttacctaaagcaggtggaggtgttgcccgaaacttggggccccttgtgaaatgtactctcctccagtccatacagggcctctggagatgggacaacccaacttacaagtcaacctaggaataggtcccctggctttcctgattcctggataaatattcacagattaaagctcggaaggttcccagtcttcccaaaggtactcttacatagactccgttttagtccatcagtagtctcggactaggaaaagagaaatcctgagaaagactgtaaataggagattcatcctgccaaactcagacagggaatgaggaaggaatgaggactgcctgggcagattccaggaaatatggtaagacagaaaaagggttttagattcagacagaatttgaatccaaactccgcctctatttgttataggatttggggcaagttatcaaacctcagttttctcatccgtaaaacagagataatgcttcttcgaagagccggtgtggggttacaggcttcgcagagacgtttaatgaatactcacatcttccttctcttctgacttaaatccagtccaggtgggcaccttatgaacagaggaaaatgaaatgcccagacaacgcaaatgaataatgataacaataatagtgcaactgcatatttataaaaatggcccaaggtttacaaagtgttcccacgtattattatctcatttgatctttatgacaacattgccatttgtttgctgctaaatgatttccattttgggtcagtgcggaggtcctaaagctgcctctttaatttccatcactgcttggagcgaaccttactctgcaaataaatcatggggacagaagaccttttctcatggatgtgaccagtcttcgacctttgcaagg

SEQ ID NO: 664 - DNA, 104894 bp, Homo sapiens
  source 1..104894: mol_type = genomic DNA
atttttcaggacaaaatgcctagaagtggtcaaataacattttattttgtagtcgagcatttgaggaacccttggacgattgtcgggaagccttcgggttaatgaagcatgaaaactattgggcctctcctgagccctttgagctcaaaaatctctaacttcctaggaggctcctcaggctcagcccaggcctgaagctgatgtatttgagaagctggtgttttagatgactgtcatctaaaacctcaaagcctcaaaagctgtttacatcagtggggttgcacctgtactctgagttagttttatcacaaaaatgggtcatttgcagctgccttttaaaggtgaaaacagatgcaaaatatattaaaaaaatcaaacagactttcaaaaaccacacacagtgccaagtagtcagtggatttgtcggcgccctgcctgagaacagcactttgataaaaggcccagctgcaagggtgcagaataacagagttgggagcactgctgccctttctttgttctgcctttcagggcagctgtcctcaaatatggggtgggcagaagtggtgtgcttactgccagcactgcctgctacaaggaaaagaactgtatggcctactaatttgggggagtgctggattaaacagcattaagatgcttctcagactgttcaatatacttgtgtgcactgcccgtctcccagggatggacacagttgtgatccccaaatgctctacagacttttaggggagggaccatgctctaggacccatgctttaagaaggcaaaaataaaccaagcactgtggctcatgcctgtaatcccacggctttgggaagtgggaggatcgcttgagcctagaggtttgaggctgcagtgagctatgattgaaccactgcatgccaggctgggtgacagaacaagaccctgtctctaaaaaaacaaaaaggaagcaaaatagaaaatgcttctttgcaaacattatgtcaattagtgatacatctaaaatacatcttgagaggctggggtaggagaattgcttgaggccaatggtttgagaccagcctgggaaacgcagtgagaccccatctctaaaacacaaaataaaataaaaaataaataattaaaatgcagtttaactgtagcagctacacccttcagcagcatctgtgagagaagtgttatttctgaccaagcagagctgtgttttaagatgaaggctccccgacctgtgaaaaacagccctagctcaaggttaacttacagtatcaacagtacattacttcagcgatgcttctgtcttcctacccactggggacaattgtctccatagcttgtatcttacattctcaaataacatctagtttctggttcccctgagaccaggtgcatcctccacccacctcaccccactgaaccaaggatctgctgtacacccttcctcattagaaacttcatctccaccctctttcccactcccccaacaaaacaatcaaagcacatgcccaaatttatttttattttgcacacataggaaacaggatcctatcaaaagagaacaaaaaagagaaacgagccaattgttgcagaggaaaagcatgcacagatctgcttcaagtttactctgaaccacggacgctccgggaattctacacaccaggagctgtctcactccaggaagtgggcacaacccaccatccacacaatggaaacaagaatggccaggaaatgtcaccgaagtgggacttccatatgcaggatcagcgttcacagtagcacaattctaaccaagttcaagggaaaacaaactctgtctcacacaaacatgggaatacaaaattgttgagccctagccatcactgtctcttaacataatttgctatcaaaaagacaaacgaaatttagtcacggacttttgggtgcctattcagctgcacccgattccaggggcagcttagtgtgctttttcattacaaaaaataaagacattaaaaatgcaaaacaaatgacctggaggaagaggagtgtttggacccacgcagttgtcttggttgtaaacagtgaacattgtgctttgttgtctcatttagatggaggcctgcagcatgggaggtaccacgctggcagtcagcagtcacaccagggtggtcagagacactggtggcagcatctgtgcttgcaactgcattcccagggtgtctgttttgttcccaagtgtctcccacaaaattccccaggaggttctccgattaaatgtcctcagagtgaaaagcatggacaccaaatcactccgtatccacttccatgagatgtcttgatgctccagttcaatgagtaacaatttctcaagaggctctgattagttcattaaaaaataagcacccccacctcattccccgtgatacagcacatctagtaatctaggcgcctcagctaagctgcatagctcttagcacacaggacaggtcagcgttcacacatcaacactataactatgcggcggaactagctccccgctagccgtcaactactcaggagactacctgtgagatcctggggtgagctgtgattcctatccaggaatgtgcatttccgaccacttcttctttattctaattatgacaacatggtcagtgcagttgagtcagtacttctcctgtcttttcccagcaagctcctcctccttggagcccagcacacacccgcttagacccaacacaacctcagagagagacgcctcagctggtctctctccctggaagagtccatgtgacttcccagccagatgtgccccgttttgaaagcacccttcagaacccaccactggagctgcctgagggaaggagacccccgggcctgagaatgccctggagaggcagtgatgtccagggaagacacacacccagtctgatttcaaagggcaggacgctctacatgcacttccataaacacaccaaaaaaatgggtaacagtcctttctccaaatcagaccaagagctcacaaaatgcaatgtctcagtttggggcaggaagtgatttcccatgaatttaaataaatttgcttagtggatgtcagatcactgtcaggcctccaaggcaagcctgattctaggccccatcctgcggtgagagctgcacgtgctacccttccctggcggtgcaggagaagtctatctttaggatatgaacagagacagaaacatgacaaggggcttgctctctcctgaatgtctctccaacagcttctggaagaggaaggctgacgagaggacaggctggagcagatgacctgctgggctcagctcagtcggctgctgcttcatcggctgagccgcccggcatggggcttcctattaatacccgggcagaaggatgcttgcctgggatgctcggcctggcccctctacatgccacctgcacctccagcactgccttcttcctctcagtctctctcctgtagatctggtcacgccaccgtaaggacgtcagccctcggggactgtcaccacactaccatgtgagagcacagactgcgtcagaaacagaagcaacagaggagacaaagtgtgagttcatatattgtactccatggaaagcctgaaagagagctgtgcttgctgtgaggatatcagaggaactgcccttagcagcccacgagaccgttcctggaagtgaacatcaacgaagacagaaaggccagggaaaggccctctcctgtctctcctcttgcacgtgggcaccccactacttggccttcactacctgttcgtacgggggcggaggcgtgttgcagtaggctggagggggcgggcaggccacactcccctggggtgagttgggtgggacctggaaagccattgccatggaattcccgacagggttcatccccggtcctcctgggtcggtgtaatagggcggccccggctgctgggctcctgaaagacagacaaacataggtgagcacagaagggaaagccccatcacaccgcaagtatgtgcaggctgcagggccagcagaccacgccccgtcattcactcagcgacagtgtatgaaggacccaacatgcccggtgagggggcacctgggctgtggtgacaagcaacacaataggcaggtccctgccctctcggggctttgattctactggactacattccacgttaccagttcacacattagggtggaggaaactgggccacagtaaggtgaggctgtctgcggtgaactatcggaagagctgcaaagaccacccaggcttcgcgactcagcctggcattatcgcaggagctccacaacccctctgggcacgccattggctggtgaccatttctgaagtaaggtctccattctccctgccgggctagtgtgccctcagggcaggagttactcacaggcagggaggccgtgcacctgggcacacatagccaggctgcagctgattgacgctccatgggtcaggagcggagccgcaggctgactccctagtgacaagctgaggagcagggcacgggggcaccacagaaggtgacaggagggtacaggctggacacccgaccccaaatctagccctcactctgaggtgctgttttcagtgtgcttactgtgatcatgcagattaacactatagaattatgcatatgtaaataaagaatcagacaaaaccgtgaaagtgctgggtgttccctgggtatagctgattttgtgacaggactcaggtgtttttgaagtgaggcttcctttagctcagggagacactcaagtgtcaaagaagctgcccctgtgtgaatattgtgtagggttttttttctttttttgcaattctccccctgacacagtgtgatatagttctgactctagaaacatgcccatcaaggtacacaagatgtcccaaagcccacataagtcagaccatgggaatctgcgcatgtgcggaaggagagcatgtagaacagaagcacaggccaggcctgcactgtctctcactgagcgctctcaactgccaggagggcactcagcacagatgccaccctgtgtgagaggctgcctcgccctgcatctgtgccgtcccacagacaccacctgagtgagatgccgtgtggtcccacagatgccacctgcgctgctctgatgcatctcacccgctgccttgggtgtgttctatttagaagtcgacttactgccattaccatgagtttcgcaagggcagagattatgttttatttagatctggatcctgctatatgttatacaattaaaaaaccaaggatttttaaaaagagggcattgcaacagtctaagcaagacattatgaaggcttctgaatattagagaaaaaatggagaagagagaatgaggcactgagggctgtcggcaatgactggcctgggattgactcgatggggagcgcacagcgtgggagacaagggctgagaagaaaaggccctaggttctgctcacaataagggccccccaacaggcagggcaatacaggagaacaggggctctgcaagaattagcgccttaccaaggtcacactactgctacagcagcaccaggacaagggcggggcagatgaaaaagtccctgctggactggagagggcggaggcagctctggagctggagcctcctgtgggaaggtggtggtggaaacatgggcatgtccaggagaaggctgcaggaaggagcagcactgaggccaggagaggagcatgaagtgtctaaggctgatgagaaggatgcataggcaatgggaagatgcggcaggaggtggtgcaccaggagccagggcagcaaggggtgggagaattttcaggaagaagtgatgttctctccccagctgaagagagatggaaataagcacggctgtagccttggggttcccgtgctctttctctacagtttcacaccatggtagacacaggtccctgctgcagtagggagaaacagtccagggtgtgggtgaagactgtaggaggggacgggtggcagctggaaggcacgcagggcaagagaaggtgcctttgtaaggatggaaacgcttgcgcatatgggcaggggtagggacagacacaggacagagagaactttcggggagaacacagctcggtgagggtaatggcctctggtaaagcacttggagcctactagctgggagctggtgcacaggaaggcacccgagacagtgggccgagtgggcagagccatgtggggtgtggccctgaaaagcacagcaagggactcggccaccacaggtttggcggagcggtgggtgaacatggccggcagcctccactgccgggcgaagcaggtccaggtgattcatttgctgacagggatgtgggaaagggcaacaggagaactgaccaaaagcctcaaggacgaagggagcagtgcgttacagtcacagatgggagccaaaatagtgacaaggagcgacaggcccactggtgcaggattcggtgtggtggggacaatctgcacagaggtgacagccaggagcaaggggactccaccacccctcccttccctacacagggtgtgccctgggaggagcccttcagttctggtttgtggttgatggttgggttaaagaaaacacacaaaacattctaggaagaggctggggttgcagaaagactttctccacaagatggggtagaaagggtaaggagaggtgagtaaaaccatggctgcccctcacgtcaccagtgttcatcaggccagcctgtgccgtgtgtgcacggtggggaatggcatgggatggggattgggtgggagaacagaggctctgccagagtgagtgcctcaccaaggtcacgctaccgctagagcagcaccaggacttgaacccagtagtgaaccagaaagtcagactctccctatgatgacaggcgtctcttgaaacaggatggtgaagtgggggaagaagttcaggcaagggtgggatgggagagccacaggagactgggggcatcacgggcccgtgtggagcgccgtctaagaattaaaggccaccacagccagcctcccagccgggctgcactcacacccttggcatgtcatctgtctctggacaatgctggagtcattttactttgaacgtcatcatctcctcctcagtgggagtcttggcatggtttgaaagggagctccaggctcagcaaagactgggaggacacgctgtgatgttaactgacaatcaccccttctcagtgagctggcccagccccacgggtgccagggggatggccaggcagcctgtattcttagcaggacctgccacctctctagcccagctgactggccagtggcgtgtcgggggggtgggcgggggggctgggccaatctttcctggggatgcaaaagagtccggcaggccgcagagggaggggtggaaatgcagggagaaggagaggcagctgacagagtatgtggcccaggagggacagaggccaggggcccaggggcctgactcctgacagcgttccagttacaccaggatccccacaccattttagtcagcccctccaaactcagggcacgtgggtctctggtctcacctctcctcctctccagccatgccctggcttccctgctctgtcccctctggcccagctgctcctccagccatgggcaggagcctcaacacagggcaccaggggcagagctcgttcctgccacccaagctgtggcaggcttggccctacattcctccccaccaatcactcatgggacggtgggctctccagagggacagggcctgctatgatgggctcctgcccacttcagagccttgtgtctcaccgcctgccctattctccatctccagcagtaaccacactgcctggatccggtctgccctctctgggccctcactagataacatatcccaggctttcaccatgcaaaccgtgtctcctggaatgcctgtgaccacctcatgccaggcacctcctagcctctggtctggctaattgccatgtatctttcagtctcagctcagaatcaccaggcagccccctcttgctgcctgtcactgccttcccagctgagcaggcacccctgtcctctggtacccagaacaaggcacgtccatgagtatgcagcagttgcctagtatggtatgattttctgagccttctgaacacgaggacagagcatcactcaccctggttccctgagagcccagaacggcaccttgcatgtggcagacgttccataaatacacgggaggagtgactgaaggggggacgagtggcgacttggatctggactttggcgctgccagattgtgctgggtgtgcatgggtttcctgagacacacctgtttctgatatgacaggagtgactggctgccccactcagcaagcctgtgccaaggccgtggctcctgtcgaggggaggatcccaaccccctgctgcaggtgagggaggggcgggagtgtggtctttgtagaagagaggcagccaggctatgtttgcaatgtggccactcacgctgcagaaccagaaacaccagcacctgcatccagtctaatcggtatcttcgtgttcatagacacagtgatggatcctaccaggaactggtgggacgggattgaaatatttgaacatggagatggagaggtatttggaatataaaagagaacggatagaaaatgaataaactgtgtacttgtcaagaacatgaacccttaggttaaaaaattggtgaccacgctggagaggctacagttgaggttaaagggcagcagggccggatgctggagcctcatgtgagtagctgagggaccccggccaggtggaggcagcgcggccgcggaagcagcatgcagaggccgcacccacccagacagctgctcagcttctgctcatttggctacaactcctcacaggacgctggccatgcttaccattcaggctcccacaaagaagagcaaccgagagaaggtggacccagttctcacagaggcagagactcatttaggaaagagaaagcaaggacacttcattctctgcatgaagcctgcggacagaagaccagcacggtctggaatgtgcccacagacttcagagagatcacggcaaagacattcccacaaaccacagatgattatatggcacatggctctggaatcaaaagcaccttaaagtcataacctcaactccttaatcacaaataatcacaaagagaacaaaaatgtgagtgtcccaaatgaagccctgtgactaaagagcaaaattacaaaatgagattattaccaggagcaaatacagaatgaagtcaggaaaaaaaagcccaagggagctgcagcttgaagcaatgactctagccaaaaaagggggctttgcatgtgcacagagaataaagaagattaagaaataaaacaaatagcaaaagaaactaccttaaatggtattctctcccaaggagaatggtttgcaaactgaaagggagaaacaaaaaaatgggtgagggaaaatgaaagaccaagataaatgagaactgaccggatgttggggagagcattcagattgcctgcctccaaccaagtacctctcagtgcaggaagcatggaatagaaccaggacctcagggtcccatgacatgctaagtgcattttcctcacagattcatgtatctcacatacagcctgtcattctagccaccgaggaatgctatgagatacacactatttcaattttacagattcaaaagcggaagtccaaataaattacacaatgtgctcaagggactctccttccagtggacactgttgcatctgtgaggacccaggcggacctctctcagccaggaaggagagttggagggggaagagctgaggggggcagcaggggcccatggaaggagcccggcccgaggatgctgctgagccatgcagttaaaccatggcccttcctctatgtgactttctatcgtaagagacaattctttcttatttttgaagctggctgaattgaggtatgtgttacttgtagccaaaagccttgaactacctcttccagagaacattttcttttttttttttttattattatactttaagttttagggtacatgtgcacaatgtgcaggttagttacatatgtatacgtgtgccatgctggtgtgctgcacccattaactcgtcatttagcgttaggtatatctcctaacgctatccctcccccatccccccaccccacaacagtccccagaatgtgatgttccccttcctgtgtccatgtgttccagagaacattttcacaaacaacagaggtgttgccagctcagtactggcatttctgtgtcctctgagctttctagtttggtttggtttgaggttgtatctgttcattttgctaaactgtctcaactcttagaaatatttctgagctcattctccaggatttttaggtaagtactgatgataaactgtttacaaacagtaatagttttgtttctccttcctgatggttgaatattttcattttagccagaaattttagagcaatattaaatattattaaatatcagttatgatattaagcaatccaattttcatgggaattattttatagtttcaccaaatgtgatgttagcaaagaatctaaagtgcatactcaacaattatttatgcaacatctcccgttcaaaaggcatagctggtaacatggagcacacagtggaaggcttgagcctggaacccaggaatttacatgaggtctttattacattaataaaaggccttacatggctagttttgagagagttttgataaggaatatatatcaaattgtgctgacagcctcttcagcacctactgagacaatcattgctttctgatataacttacaatgttaattgcgtgcctaaaataaaacgatcttttgttaagaagatcatggttggttatgatggtttactattttgacacattgcttaattcagtttcctaaatatgattcgatataattttattttggtgtttattcccaagttatactaactttacaacatgaatacgtagcattcctatgatttgcagtaattgatacattcattaaaatgaattgtttcttaaaagtttcaaaaaagccatatgaacttaaagacattctgggagataattctttgaaaatgtcttcaagctcttgcttgctttttgagttattgaaattttcaatgtctttacgcactttggtatcataaagtacttacgcactttgccatcttaccagattttccaattcatgaatacttccttgtgattttcaactcctttgaatctgtagtgttttaatttatgcttttatttttgtgttcttctcctttattgattagatttatcaggaggggaacaagcaatgtgatttgctctattgctttttatcaactgctaacttagatttataattatatttttctgatttttacaattaatttgtatttcatttataatttctcccatctctacttcccaggcttaattttacccactctttatatatttctgtgactttattaatttctgagcctcttttgaggagagctcagttcatttgctttttcataaacttttaacagaataaagctatgaatctattaatacctctaaaaattggctgaacatgtactgcatatgctgttgcattcctttcactgatgcctatgtccatttgtgtgttcaacaaagactgaattctcactgagtgccagcactgttctgggcactgaggatgtaacaatgacaaaaactgaaaatctcagttctcacgttacttgcagtttagagagacaatgagcaaggtaagaaaaataggttagttggtgataagtgctaaagatgaaaataaagcaggaaaattgaaaaatgaaaagccaacaggggagggggaagggcagtgccattcttccttgtgtctgcaggcctcatgaggaggtgaaggacctcaaggaaatggaactgttgggcagaaggggcaggcagcaggtactggaggagcgtgccgtgtacctgggcgtgtccatggagaaagagacttttaggcagaggaatggctgtctggagggtctcaggacaagtcacaggccagtgagtggcagcaggggagtgagccaggaggggccacaggagaggccagagcccgctgggcagccaggaggggtgctgagagaagagagggcctccttggcctctcaaagtgcttctgtggcacagtgggcccatgagagtgttgggagcacaagccctggctcctgctgtgactctggctgccttgctggaagcaagaggcagcaagagaaccaccagggaggctctcatcagagtctgaataaagggtggtagcagccagggtggtgtcgagagaaaaggccaactggcctcaaggctcctggctggagccctggaagaacagaggtggggcctggaaagagggcggaggaaagaaccagcactgcagggtcctccactcccacctttttgactcaatacatcatttatgggactagtcttttatttccaagtgggtgcagagcatgcatttgttcatttacagacatctacaaactgcaggtgtcctactgggagtagtaactactgcccctcagtgagtgctgactctccggccctgtgctcagcaggggacacgaaggaagtactcttaggatcccagcttcaggggcttgaggctcagagaactgagcaactttccgaaaatcgccacagaagcacgaagtttgaaacaaagcccctagtatccggaggtatgcagcttctacttctacaaacgtattcggacacctttgtagtacaaaatctaagcgcttctttcaaatgttccatttatttttacattttgatcagattaatagcaatgcattgacactcctacagtttccatcactctgtcatatttttacatttttgttttacatactttgaaaattaagacatgactattgtatcttcaccttttataaaaggtgatttttatcagtattaaaaggacttccttttcatatgcatatattagtaaatctatggaatatttctcaaagaacacgcaaaaaaaaactgataagcgggaggaagggaattggactgcagactgtatatttcttcttccactgtataacgctgtacatttcctcttgaggtacatacattatccattacaaaaaagaacctcctgctactgccttttggggaagagaggaagaagggaggtattttttttttttttttttgagacggagtctcactctttccctcaggctggagtgcagtggcgctatctaggctcactgcaagctctgcctcccgagtagctgggactacaggcacccaccaccacacctggctaattttttttttttttttttttttgtatttttagtagagatggggattcaccgtgttagtcagggaggtagggcggtctcgatctcctgacctcatgatccgcctgcctcagcctcccaaagtgctgggattacaggcgtgagccaccgcgtccggccaagaggaggaagggagttaaaaacatgtgggtattaggcacccagccttcaggccgacctgttagggtttacagagaccatacacttgaaacacagctgagatgcatgtgaacattgctttaagacattggggccctaatgtcccacaagaaaaggcacagacaaacttagtgagcaagattaagtagaaaatgaaacccccacactaagttttcactttttctttcctagctgtataaatcagaagctgagtgaagacaacggttttgcttgctgctgctgattttttaaaaacaaaagcaaaaataactgtgttaataaagagaattccagtgcattacacagagcagatcctcaagcatctgccagaaattagagtaaaagcagtcatgttattccaagagacgagcactaactttcactccggctctgcagagttcacaggtgctcacgctattcttaatgctgaacttgtatgactgtggccagcacagcccatccttcaatgcttgtgtcttcatcaaacctgtagcgcttctcagtgcagggggcatcctgcatcacctatttcatcattcaccttgctgaaatacagaccctgactcagcggctctgggtggcgctggggtgagggagagcctgcatttctaacaggctccagggaccatgcatgtcttcaggctgtaatttgaccagcaggtgcgaggcagttgataagtgtctatggatcctgataacatgttatgattatcatccctcattacagagggggaatctgagtcatgaagggtaggtccttcccttcactcaacccttcagtaagttccatgaactctgggcccaggaaggaccccatccctgctctgtcctcaccatcccaatgccccaccctggccaaatagggcagtgcctcttacagctctctctcgggttcctttgcttaggtttatgattctctccaaaagctctcctatgtggctctcaagtcacctttgaccccgccccttctttgctaatccctcctggtgaattctgttactttcccatgtcatgctctttagcctctctcattaaagcagaatatacttggatgttgattttaacacaacatgttggtccttttttcttttttcttttttttgagatggaatttcgctcttgttgccttggagggcaacagtgcgatcagatcattgcaacctccgcctcctgggttcaagcaattctcctgtctcagcctcccgagtagctgggattacaggcacatgccaccatgcctggctaatttttgtatttttagtagagacagggtttcatcatatcggtcaggctggtctcaaactcctgacctcaggtgatccacctgcctcagcctccccaaagtgctgggattaccggcgagagccaccgcacccagccatctttttcttcttacagaggagtgttaacacattcctcttcactgccataatatagactgtggatgatcttcctctgccatgttttgtttttgtttccttgctgtttcttatctagtctgtttccctgacctcccccaactttttaacttttattactatctttgaaagtggtttagaatgtggacatgttgctttagatttcaagaggagctactgtagagacatcccaggaactgtcaaacacatcagacttgactttgtggagattcatcctcgtgagcctccttccacccccttgccagtctttcttcactgaacctagagaagcacaggtgctttcctttatgatctcatcacgcacttctccaacctacagtcgctggggggtgggggtgagcagcagtgcaggctggagctgctgaggacagcaccatgtcctcagtggagtggtctctgtgccagccagctgggtgtggagtaaggagattattcgcacggggtgagcttgggatgggtgcccttgagaatcccatccagccttgagattcttttgacattttttctttgaagtaatataatgaacatgtagcaaagctaattaacaaaaaagagagagaaaaggcatcccagaaatagaatggagagagaaataactacaaagacaatggttactgtaaaagacgtttagaatactgtgaacaagtatgcgttcatactccctcagagtctcccaaagcaacccaccctactgacacaccgacttctggcctctagaactgggggaagacacgttcttgctgttttaagccaccagtctgtgtagtactttgtgagggcagccccgggacatgaatccagtacgcaccttctcctgctgtcaacagcacaagcccacgtcagcccacagcatgcaagacagtctcagcacaacaaaaccagcactgctcccagaaacataattactggaaacattttaaaactgtgcagggcttctttttgtttgtttttttaggattagccctgggattctgtgaccctgtaatttttttctcccctttttgcctaagttagatcaaaggtaattaataacaaatccccatggccacatgcccaattaagctcctggctttgttttcagtaatcatcatcacgtgcgcaggtctcacctaagcagccagcccacctccccacccaccagcttctcctccacagggaaccaaggctgaaaatactgatactcaacaaacagcagacacaaaaacaccatttcacatccttcaaaagtattttcccaagtcattagaagtcttctaaaaagaagagaaaacatgacacagaactgaaagtcgatttaaggttgagaaggtaaaaggcagatagaatggaaatgcatgtcatatttttgctgaatttccacaggcaatctgaatgtgtatgataaaagggacttccaaattcagcctttcactttgggtggtgcagcacccacgtttttctatgagaggaggtcggaagtcactgtcgccctgtcctcatcccagagctgcaggccggggacagctgcctcataaccccggctgtcctgtggctgcactgtgacgccacacagggcccacacagggcgcccgcacacgggacgtgcacacagtacattcacagagcacttagtgacagacggcaggttggacgtgttaggcacagggacctcacgtggggctgcagacctcattgcaacaagggacctccagtcttgtttggcccacattttccctcatccgcccctcggaagggccggacgcagccatttcaaatattaatacatttagggagaaaagtgcaatggtagactcgggagacaagggatctgaaggaggctctgcttcccacggggagaggaatgcagccagcgaggcgggcgggggacctgtcagacccagagcttgcgtgagcaaatgtgagggagacccttggtacgtgcagtgtgtccctccagatgcaggcacccatgagtggaccacgacgggccagaggctccggctccacctcagccccatcactggcgaagcagaggacagtgggcaagggacttaaatctgctgtaagtttctgttcccactgatcaaagatcatagatgtgcaagctttgttgtgagtaatgtaacaacaggaattgcctaccaacagggcaggctgtaaaaaattcttcttgaaatacagtctgtgcaaagtgtgttatctgtcataatttatagtggctaaggacattaaatgctttcacatggataaaaaaacagctgctgcttttgtatggcagaacattctagatgtatccactttatgcaaactgggctgtgcaaaccataatagcaaggcagaggtcacagggaggggaggggcagcacgggggctggaaagagaagtgccgcgtaagaataacggagacagagacagaatgtcagatgcacagagctggaggactttgtggaaacacattcctgctggtgaggaggcccgccatattgggaggccatctcaattcctgggcgtcaccaagtaagacagttcccacacccacaccccctcaccctgaccctgatcaaccagtttccttctgccatcagggatgaacaggtaaggaatattctggtagccatgagaatgtatgaatagattggcattggtgatttgtaaacaaaaaagtatttccagttaatttctttcagcaaaaccataaactcaaaaatctctatcctgaaggcagctgcccagggcagcacagggcaggcaatgagtgtgagaccccacaatgcaacagacccttacaaaccccccaaggccacacaccctgggtccatctgccctgctgtttcttcaggaaaaaacccagaatggaaatgctggagccccaggggctggagaccggggagaggtggcctgtaaggctgtcccatcaccatccccgcacgtcagaagcaccgtcacgttggaaaagaatgacgcttattccaccagttctgaagccagatgtcctcacaaccgaagcagccctgtttgtgcttgggctatgacttgagggtaattaaactgtcaaaacaccctccctactatttccattttcttgcagttggtgtcatttagtcactgcaggctgacagacttattacaggattgagacatgagaatgaacagtcagaaacctataaatgaactcaccacaaatggctgctggaaaggaagaaaactatctgtcgatgggaaaactccatccacttcagtcacattaaaggaaatcatttttaaagaaaacttgaatcacattaacaccacagatttcactgactgtcctccgcaatctctctctatgtatctgtggaattccatagttgaactcatgaccattttttagaggcagggtcaagctatgttgcccaggctggaggacagtggctattcacaggcttaatcacagtacactacagtcttgagctcttggcctcaaaccatcctctcacttcagcattctgactggctgggactacaggtgtatgtcactgggcctggctagcctcatgaccatttcacaaaaaacactatccaatgctctcttccctaactgcaccttgatggtcttgccgtaccagcaaattgtcttgatcttgactatgaactttaatggccacataatattccacaaagaagatggaccataattcaatcatcgttttctttggagctcccttaaccacccccttgccacattcaatcacaggggcaccacactcagctgaggccacctcctgccagccagccagccagcccttccttcccccaggcctacagtgctgcctcagcctaggcttttacattttctccaccgttctacagttcctaaagagcagggaggattctcacccacaccctccacctgtgtgaacacagtggctggagctagttagctcatgttttcagagtgagtgaataaatgaatgaagacaattttttcctctctacccaggaaaacatattggtgggaccctgccagcatcctgatggggaaggatttggggttgggcatttagggagctctttctgctgctgctgcatcttggctgacactatatgcatagattacacagaatgaggagtgcttttctgcacaccgtttcattttgcagttaaggtgctgaggtttagaagggaccgtggcctaccctgggtctcacagacctcaggcctcttaactccctgaccagggcctcttcctcaaaccacagctactccacactcctcccactttccagcctctgcacaacccggccaggccctgagcccttcggccagcagctgcagcctttgggtcctggttcctgggctggcctggagccccacctctgaacctcagcctcctgctgactttgccagcccctttccaccacgttcagagttctgccccaacccacaccaacccccaggaccacaatgctgccaatttcctcccctccccgaccagaagcctctttgcaatgcacagattctctgctttcccatgctcatcagtgatgctggtcccagcaggagcgccatgcgagcccccctacaccccagaatatgagccactgccccccctgccccagtgggtgagtctgggtcctctaaatccctctgctttttcatcttcattaacaggcatcccacgcctgaacccacttcccctctcagaccagcagaggaaaaatggggctctgctgaaaattcactaacacccaccctgctttgtgcagatgcctgcacaccttggcactgcccggacagcctcaggcatgacatttaccctgtggaccacatgggacattgggattcctcggctcctctctctccctggactgccaaactctgtgtggccctcctctcagtccccacgcccccagggcccatgccacagatagtctgggatctgagcagacagctgcagcagggtgaagccaccctcaggggaggcaggtgtccagaccaacagcagacaggaccctgcagaccccattcttttgttcactattactctgtctaggaaacagctgaattcttcccaagctcagcactgttaacaaatgatccagccctggacctgacagggaaatgatggaaactgtacactaccgggagccctgggagcctgctttcatatgacagtctggatatcctgggatcagccacaccgttgcaggcctgcaagaagtataaaatgaaaaacggatggcaaaccaagtctacattttggtcagagaagatgcgctgggaccagcagccactcgctgtagagagctgggggcttacttattcttaatccaaatggctcttccgtgggaagccttcctggagttgtgcaccagatggagtctcctacttacatggtttcctagcattctcaactttctctccctcgcactcatgatggtcagtcactatagagttgtttgcgtgaaagctcacacgggtgctggagctgtgcatgcagcggtgactgagggcaggtgtccaggctgtgcagtgttttgagctcctgcaggcgcctcagcaggtgtgcagtaaatatgggccaagacagcaattcaggcaggtctgcgctccaggctgtgactgtagttgtgatgtattccgaccctggtttaccaggctgcaaacctgggagctcccacagttcatccagcctgaggatgagggccgggcatctacttggtgcctgagaccatgagtcctgtacacagccccgtggggagcccagtgtaaacatggagcattaaagctggtaaagcccctggcaggggacccagggagaaagtggagatgtgaagcagccagagacaacttcactatgggtacaacacagagcagcaccttggaggaaggcattttccaggcagaaggagggcgtgtgcaggcctcagtgcgatgcaggactagagagaggaggtcgctcaaactggacacagaggagcggggatgggtctgaggaagctgtgaatgcgtcctcagtcctcagctagggactgtggacttacactgtgagccaggtgagctggcagagaccctgccgcagaaaaatagcacggccgatgtgcttctgttttttgttttttaagacccttctgatagccaagtggaagacagaggagctggtggagaccagtggccagcaggcactgctccagggtgagataagggatgtggcagatctaatcgcctggttgctggggattctcccagacagatggagcggggttaggtggggtgtggggctgtgcagaacagagggatgggaccagaaaggagtgcacatagggatgcattctcttctcaaaaccctggcatgccagggttcaaaagaattatgcagctgcaggcacagtctcagcacctcacctactcaccacaagagccccagttcacatgagtggtagactctgagctcggccaggaccacggaccagggacatgtggccttctgcactgggggcagtggggcctcccatgccaagtggggcaggggctgctcctccctgtactaaaacctctctgactgatccagatgagacccagtgagtggcggctttcatctctcattttaacagaaattttgcactttaccctatgatgcagcacaaatctgaaacgattcaaatatttccaaatatcaaaggctaaaatccacttacggattcaaaatggtactaacctgactgtaagtttaaggcacagctctcagtgaactgctgtggaaaatatatatttttctgagcaacattttttaaaataaagaaaattctttctgaaaggaaaaccctgtggagtatctggtggaaaaaagctgtaaaagaacaaatatgcaaatgactttgcatcttgataacagcctgttctcaggaaaacagaagagagaagataattttctcctattacattcaatccctctacttctctcctatttaaaaaccactttattgaggtctgactgacaggcaaaaagctgtgcatgtttaagacctacaacctgatgagtttaaagacaggggcacatccagaaaaccatagccatgctctattccataaacatctctattacctacaaaagttttctctgctcttcttgttatttttgtgtgataagaacatatattaacataagacctaccctcttagcaaaattttaattatacattacagttgtattaattgtaggtcctacactgtacaatagatctctaggacttattcatttttcttaactgaaactttgtaaaagcgaaggcatccactgctcctagaactgaccacctatccacagtgtgcaatcaatagacagtcccatccccaggctcccaggtggaaactgtggctgggagcatggcggtgcagacatcagcaacacccctctgcccagcctcactctacacctggccagaagaccagcgctctgatgagccgagccagcccagccctccaggacccttggctccccgctgtcatcagagagctccctggcctgtgtcctaaggaagtccacaccacccaccacagtatgtaggagttttagatggctaaggcaatgttttacaagaattaagaaacagctaattcattttgaccctgggatgtcactttgggtgttatgcactaaacagactacatgtgacctgtacaagaatgtctattgctatggtctttgtaagtatttggaatactagtaactgcacaatgaatacttgttgaatgcatgaataaaagacaaaacatgagaaaacaaaacaaattatcagcaataataaaatatctaagcaaattaccatttagtaacataattagtatctagtccagaagcactaaaaatggcaggggtattaccgctcctacacagaaatttatatgtgaaataatgtttaaggaaaagggcagagagcaaataatacgcttatacaaactgcatcatatcacgtgcatatgtggcacactgataactgtaagaatatgaggtgacgggcgtgcgatataccttacatttgttatctgcacaaatgcacaatggagctggtcatcagaactaaaaaaatgaataacacacctgagcgctctcttctggcagtaccctttctgcagcagtaccctttataaatgttggcagacgacacacactgtggggaggagagacaaggacagggctggctgacctgggccgggatttgggggctgcctggtgtaggacacattgaaggctggctcctcgatcagcggcggggggtacatgcgcctccggatgaagaagccggctccgcagcagaaaagcacgcccatcatcagaaggaacctgaggagagtacagacgtgagggtggtgctcccaggtgggggccctgagggcttggccctacagctcaaaggcctcatgcactcctcgggggtccgggaccaatgactcccaaatgcacgagtcagaaggcaagggcagagccatgaggctcgcacctcagacttggtcctcttgggcccattttacccagggacattcctctagtggatagcaacaagtagatgcttgacctgcggcctctgggacagcccctggtgaggccacccaccctgaaaagcaccgtaaaagaaaaagctcatgcagtcacttcctcgtccacggctctgacctcagctcgacattttagttagaagaggagatgccatctaaatcctgtctgaaagccatggccgatccagccttggcctcgctgtctgtctctgttttccattcttcactgtcaaagcaccaaggcagagcacatttatcctccagaccacgtctccattatcacatcaacacccacaaggaaacagaagtacccttcctggagcacaccttaattacagagaaactatgggaatagaaatacaatcaatgaaaatagaatcaagagaaatacaatctatcaatagaaataaaatacaaacaataacagaagcagagctgaactctttaagggtagcacctttgtccaacccatctgtgaattctcattgactatcacttcatcagcattcagtaaacgactgcagaatgaacacatgaatggcttccttccattcctcacttgcaccatactttttgtttctagaaaaagaggagagtcactttgagaagaactagtagtagacaaaactggcaaactggcaaactcttgcccatctctgaactgaaattatgaggggacccatggaactgtccagaagccatgcagacacccacacggtgagggcacctgctgccctgtgaggatgggcacacagcagagcgggtcgcagtcagtggcactggtccacatataaaagaagctcttaagagcgtacgataaagcctttgagaatattaatgtgatgtcaaggccttcagccagtccaaaagtatttactggataatcttggaaggctgagcagggagaaaagccagaggcacgagacaggaatgactcaggaaagactgaaactgtggcctttgtcatctgccgtctaattcattattcattcagcaagtcatcttcaggtgcctgctatgccctgtcaccatactgatcacagcaatgagtagacaggtgaggggccccccgaccccgccaacactgagcttacagaggagggagacagataccaacttttacaattatttatctacaacctggtaagtgctaaaaaagaaaaatgagcgatgcaagaagaatactgtgtgtgtgattgggtaaaatatacataaatataatttactattttaatcatttttaagtgtataattcagtgcaccaagaggtttgaacaagggtatctgtggtggtgagcaagactgggaacactgcatttcttttagtgacagctgggctgggctctgaagaatgagaagagacaagctgaaggggaagaaggggcattctgggtggaaagaacacagagcaggtactggggccggagaaggtgggagcaggaggcctggaggctcagtccccatgatgggcggagggagcggccatggggagcccggagacccaaaccgttcaggagtgtggtgatgtaaggcttaatgtgctcggcatcaagaacactcactaagttcccaaagggaacggcttcctctcctaaaaccgatttccctcaggtgggctcagtgacagtcttacactcagcactgagtcctgctgttagtatctgggtagaaatatacaaagcacagagaggctggatgtgtacagggtttactttctcagagccactggccacttccaagagaccaggctcgctggattgaaaaatgcagaaggcacctgagatcttagtcttgtctaaaaaataagctaaaatgtcggttccactgccaacagtagtaagaacattttgtttttctacacaaaaggaaatgacattgcagctcccaccttagactaatggtgagcaagcataaggcgaggctggaatggagttacacgggatccacttcatcccttactgaaatcatagtctgataacttattctgttcatttatgtttattttaaaaatttatttaaaataatttttggtagagacggagtctcactatgttgccgagtgatctcaaattcctggcttcagtgatcctcccaccttggcctcccaaagtgcaccattgtgctaggccaagaacttattttaaaagagagaaactaacaaaggggcaggagaaagcgcttctaaaaacaaggaaagagacgaagcagggtgttggctgggagagaggagtagtagtaagaaaggcagttcttgcagtgctgggggtacgggctggctgttccctagatgtcctctttggttgctcagcaggttttggaagctttcaaagggattaagagaggaaggtttgtgccttttttttaacattagaagttacctggttactttaattcaatttgttttttgattcctccccccgaccccccagccccgagtgtagcagttctcaattctgcagtcccaaggactggtgcagctactgtgcaagccctgcccagaccccactcaggactccgcatgggaccctgctgtggactcacccacagtgccacctaggctagttctcactcgggcccactgtgctttctgagtccactcaagggtgccatcggtccaccttctctactcttgattccatccagacctccttggtgaaaagatcctcaagatcttggagttggcaggaactctgaaggcattctctttcaaaacctttgttttatggtcaggagacaccttcaaacgttgtggggcccaggcagcagagcagcccctccctcccatcctgccgccactcctgtccaccaaatgctcatcctcaccacagaagcttcccatcaccttttaacacatccactcttcttacactctggccctgcaaggtgctgtccctctgccccaaacgccctctctgacgacccagtcaaaagctttgtagctttctccaacttttctggcttcagaagttctgtgctctggcttgaaagtatccacacctcattatctgcttagacatcatcttcttcaggagtctgcctgcctaaagcctctccataaaaccccagcacaatgcctggtgtatatcagacccgatgttgattgagagagaaaatgcatggggtgaacccaggtgccctttgtatttcgggtggggcactgtaagctcacacccccaggtgctccctggctacaacgccagcttggaaccctgtgtcggaatctcaacattaatgactcagccccatcttctggcatctggcactcagatcttccaacagcctgaccttatgcaatgggacttgtgggagcttctccaaatggggcccaccaagtcgtcgtgtgctgcctcgccaaggtgtcctgcctctgacaggtgaccctggccagcagctaggaagcacctggctgccagtgcagctacagcttctgggcagctccacagaagctgccaggccctaaaagttcagctggactttctcaaacttctcttctttttgatcatccaatgcctgaacgctgaccagctttttcattttttacaagcattctcacgccctcatcatcattcatctagtgctttagaccaacccaaaatccttacaagcccgttcacagttcagggtttcacactccagacggtccgcctccttccactccaaggtcccaggaggaggctccggagcaaggcctgccctgaagctgggtcttgcccctgacactgggccctccccgtctctggtactggccccctcaatctggagatgcacacagagccgttaacctttgaacagtcttaggctacaacaattattcttctgttacagagttttaggaaatggcacctctgcagtgtggggacctgacaccagctcccttgttaggggggtacacctaggtggggcttaccgggctggtcctaagggaggcctggccagcagctgtaaggtcaggtgaggccaaggaggtggtgaggtgatgatgaaagaaggcatcactattaaagaacatcctcgtcacccaacacgtggagtccccactccctataggcttccctaatcaaaccctgggcacaggtgttaagggagaaagataaaaccgcataaaaattcaggtggctgctgtcacatgctcagtaaggtcttaaagcctcaaaaggtcagtaaagtcaaaatcttaacatcataaaaaagcttgcatcatgcagagagcaaactctaaacttttttgaagttcactgaagggcatcaccactgcatgggagaagaagagcaggtgggtacaagaaatgctgctttggtttataaatcctttcccacacgtgctctgccaccctctcatctgaagcaatacctgtcatctccagagtctaacagatgctcggggcactccagcaggcgtcctgaggctcccgcccacaggaggctccccccatggaatgtgctcccacccttccaggatgctgcaggcatggaaccagttcctactcaaggagcagactttggactgctccgtatgcgccccagaggagctggaggcagctgggtgcaggctgcctatcttgaaagcgaagagtcagccaacacaagatggatggggaagagtctggacaatgaaaactcgatcgcctgccagtctcagttgggtgattttctgattcttcaagacaatcagccttggctccatttcagaaactggccgaggagctgctgaaggatgaggctgttgtccagccaccttaccagaagcagagctcttcttcccactccaaaatccgtgaaaacaaaaacaggcttcccacaaaccccatgcgtgcaactgccggtcatgaagccaacccaaacatacccattttcctgaccaaggctgtccttgaggccaccacccaagtgaaggtgtcgcatccaaggctgtgacaacactgatggggggggggggggggcagagctctcggggtagggaacaaggaggagttgtgacctaccagaagtaccacagcctctgtatggagagggcccgcacacagcacctggagccacagcagtcctcgtaggagcggcatctgtggagagaggcacaggctggtcagcactgaattggaagcagccaccggaccagccatgcggcccaggctgggcttcaatgtaatcattcttgaaggaagaaatcagtaagagcaaaaaggacagaactgcctccactgcatttcacagaaccagcagagcagaatgacatcagcctgtggcccaaagcaaggtgctgaggtgggcacagtcagggtgatgcaaagccctgcatttaacaagcatcctgtgtgccaaatccaatggattccttccgggaggtggcacaaccaaagacagacattaagcctaccaggactgctgctgggaggaggctccacaggagcccagcacccacgtggtgctcatccctgctgtcttcagtccccgactacggggaaaagatggaaataccccaccacatccactgaggctaaaagcagaggctgtggagttagataaattgcaggtgtggtcctggtcctgccacttactagttgtggggacttctggcgagtctcagtttctccatcagcaaaatgagtggaactgcaggggccctgcacagtactgacttaagttttaaggcctttctcaccatataaagtgctgatggcactatcactgctcacgctgcctccctcccctcatcccccaacgtgtctgaggtttccgggcccctggcaggccacagctctcaggggtgtgctcagaagctgttcccagagagctgcctgagcatgggcaggtgaggcactcaggtgaggcactcggtgccctcgacatccctgccctgccccaaccccacgtcctccttgaagagagaagatgccatgaaagtgcaaacccttccgttttacagagaagttttcactagagcgtttcgagcccaagcagcaatggattggcagggatgtggggagggccacttctctacaatattaaaccattacctaattgtgatctaggttcctgccagtttttttcctttaaaaaaaagtacctgggagaaatatacaattcagcctaaggtcttgggcactgaatgtgtagattattgcagtacaaataggcttgttttatgtagaagtatgtgtagaaaactagttaagatgcaaagtgagataacagcggcctggaactcagcagacccaagctccaaagctgctcttccctggttgtgcacccagtaggcccaaagctcctggaggtggtgctgcctctttgtaaacaccccgcacccaacggcagctaaatcctctattgtttcaaggacaaactgggctgagagacactccctccccactccacccccacgccattccacagacaatatggcagcattcatgtacagtcttcccctggcccatgaacatgaatccctacccagtacccaaagtgttgtgatttccatgaaatgctcccattggctcccactgagagttacctaaatgagtgctcaagaatgttgctggtcctggccgggtgcagtggctcacacctgtaatctcagcactttgggaggccaaggcaggtggaccacttgaggtcaggagttcgagaccagcctggccaacatggtgaaaccctgtctctactaaaaatacaaaaattagctgggcatagtgtgtgcacctgtagtcccggctactcagggaactgaggtagaagaactgcttgaacccaggaggcagaggttgcagtgagccaagatcgtgccacttgcactcctgacactccatgcatccaccaaggggctactaggagcctgctctgtgctttcctgagggtggagcagggaaaacccagaggaaacccctgctggggaggagctttctctctagaagggggagaaaatagtaaacgagaaaacataaactgtgttagacagtaataagttcttctgtggtgaaaaatggagccggcaccggcaggttgagagcacgaggcagcagggtgctcagggaggacatgtgcaggaggtgacgtctgaaaagagagcacgcaggaatccagtctgccaatgagggaagctgacacagggtctcagtgctcgggacgggggaatgctggtacccctggttccacggctgcatgctggagatgagtgcaggagcacagggtgtgagggggagtgagacacctggtctggctgtttctgcaggccagcgccctgcacaaacagtaccttctgcaattctccgaggccttcccctagaatctcactggtgtcggttgatcaatgtgtgtgtgcctgtgtgtgtggaagagaagggagcagtcgagggagatgaaggacttcttgcttttagggtggatggagttcagacaattaactgtaaactaaaagaggtgggaccgtttcctctcacgaatgtgcaaagacaggcgtcctcagcactccagtgaggttcatggtgagtttaggagtgtggaaggcagaatgcaaccatggcccgaagaattgcacccctcagagaacccaccctgcataatcccctcctcttcagtgggcaggaccctgtgaataccagatggccactcccacaatcacagaacattcaacgagatggtgtgttatctaagtctctgcccttgcagactggagattctcctgctggctttgaaatagtattaatagcagccacgtgagagggccatgtagccaggactgagtgtggtctgcaggcaccaacagcaatcccagcaggacctcaatcctacaaccacaagaaaccgaattctgccaacaacccaaatcaattcggaggactccaagctccaggtgagaatgcagtgcagcccactgcttaatctcagccttgtgaggtggccctgagcccagaacccaaatgtgctttcccagacttgagatctacagagctctgcagtaataagggtgtgctgtttcagtctgctacgtttatagtgatttactacacagccacagagtcaagaagaacacagcttacaggttatgagcacttcttatcttacaccaggctaaatgcttcacaaacgtcttgttaattttcaaaacatccacatacaagataaagtattattagtgccatgtttgaaataagcttagaagcaagacgttagagatgttgcacctccagcccaggtcactgtctgcagaagcgaagagtggacttggccagcatttcaggaaagcattttgcacagatgctgcctctccagtaacatggagcctttcatgaccaaagggtcaccttctctatccccacttgattttcctattcttctttggccctgcttttataacctgctgtggaaatttcaaagaccatggtaacagagacaatgtgaaaaaaacagacccttgggcaaatgacaggaggtccctgagacaggacccacagacaggaactcagcaaccactctttaatggtgcttgcatggttctttgttcagcttggaactgcatactgaccagaaagatttccagaaaaacctgtatcatatgatgtcagcaatgcgctacaattagcaggtaacttaatcatagagacatataataaagatgcgatatgaggtgaaaggacggcgtcgatttgtagtgaatggcggatgcccccacaacattagctgttttcagcagacatccacacacatgcacaaaaatctatgtgtgccaggctgtgacataaggcacacttcttcacagctgctgccagggaagccccaagttaaaagtggacaggctcagtcttctggtgtgtccaggactggctccattcatcctcgtggaagattctgggtggccctcaggctcaggtctccctgactgtaaggtcactttctgctgttaacagtgctgggctaaggtctttcggtccttgtcttctgtctaggtggcaatggctttagtcaaatggctcttaccatttttacgcctaattctactatatattgtcctcaagtgatcaaattctagaagatacaacactcatgaataccctctcaaattggacactcagctcactgcctagccatgaacagcctcctctgcacgtgctgatggtgagggaggggaataaggggggtgcagaacagagacgacatacacctgcagcttagggggaactggccatgatcctctgagctcctgctagttccctcccattgctccaccaccctctgccaccaagatgctcctgtgtgtctctctctcgggttttactccagactgtaacagctcttatatctgtgctctagctctgagcacagccaatgcttaagaggtattaatacttgggtccctccaatgctggcagccatgcacttgatataaaagaggaaagcaggtatacactaataaatttagtgactgaatcatttttcatgagctgaatttgctaaaatgcttccctttcagctttacacttgtaaggaagcatttgctgcctggaaacctaagccctatggcattctatttcccatgctggagagagcagactaccagctttcagacatatgtagagccctcgtccagaattaacacacatacacccctcagcctgagaacatacccgtcctagaatatttggagtataacggattacaagttcctctttgttggcaagatacaacatctatgtgctctagctcacttttcagaatccaaatttggaacaccagcagcaaatacacgctgtcaactgattatctctttcttctctcaaaacacaggaaccctttatgctccttccatgagctgaagacccattcactctccgcattcttgcggctcatctgcggcgctggcccggctcccattgtggatgctggcaggccccagctactcgaaggagcacacaattacccaggtgctgacactgttaccccttttctgtctgctgctttcttccttttgaagctgctggtaaattggggccctaagcacacacacctgctgatgttccaaagagctgcaattacaaagagatattcactgcaacactgagcttaattaaagtagtaaacattaccaggcagtcgagcacactgaagatgcctatcatggatgcatcaagtcaaatactcctactgccctaagcctcagaatggcaatgctgctcccaaggacgtcgcaagactacacctttgcagaacagatcaggatggagaaaacagcaagggtttttcatctcgttcttctctgtgtgccagatgtataaactgtcagacttgccatagaaaggaagaaacattactcttaactaaatccgctccacagcatatctaattatagtcctgagactctgaaatacacatgatacttcaaaagaatgaaaagatcacgtatagcagcagacatgggcccctggacttactgcctgttagccaagtattccttactgtacccctggatacaaatgtagatttctgctgaggtcagagaatgggtagtccactctgagcagctgctgacaggtaattaggtatattatagagataaaagggtgcctgccttttatctcaatgataggacctgcggtccctgggattcgtcatgtaaaaggaaatgtatgtctgagagtctacgggccacgatttagacaggtgtcagagcaacaaacaaatgcaaacaacaggtggtcgctgtgggagtttttggagcctaagaaggaagcatgtgttatgcttagtcctgcacaggaggaaagagggtatggccactggacacatttaattcttagcctttgggttacataaatctcacgagaaggaaaggataacatactaggtcaaggaatgttcagtgttagtaaagtcacaaaatctttctatgtaaaaaagaaaaaaagccaaaagtcagtttgtaaacctttccatgtgttgttgctatggatggaaagtgtctcccctagaccggtgtgttgaaaggctaccccgcaatgggatggtgttaaaaggtggggcttttggaaggtgatccggttaccaaggtgaagccctcgtgacagggttgggggtctctgtaagaagagccatgaagagggcttgctgcttgctccactccccaccacgtgaggatggaacaagacagtgcctacgaaccacggacagagccctcaacagacaccagagctgacggaaccttggtcttggacttccagcctccagagctgtgagaaataaacacacattgtttaagccccacagcctctggtattgctgttacagcagcctgaacttaagcaccactttagcagtaattgtatttaaaaggatttatagaaaaatcatctctgcatctggtggagcagctaaagtcggagtaaaatattcagggtgcgggtctggagatagagttggtggggactgtaacttttttggggagttcgagaatccaatcctttctcctgcctgcaggattaaccctcagcaaacctttctcttcactaagcacttgctggtacaacagctcctttctcccatccagtcccagtctctcaatttgacagctggtctgttctcctcaatcacactgcccctgccagctaaccctgctttttacactactcattattacctgcattctccacagagctgagcccgcagcacatacttgaaggaggcttcccaatttagaagcaggaagtacattcaggcttatcactggccttcgaattagctacctatgagaaattgggctctccagagaaactaaacacagaaccctataaagtttcagcagaaaactccaaaggatacatgagcctctgggggagcagaggaagactcggtccttagccacccagtgccccagcaaatctccttgtaaggactgcagagctctgtgcctcacctggatcaaggaatccacccgaccattcagtgactgaccttcccctccaacctgcccaggcagacgctgccactccctgcagcaaggccccagggcaagtgccttccatgaccatgggcactgttccttgtgcagaatccaaggcaggccccactaggctgattcatgactcacacagccagtctttctttccaatgtccaaaaggactcgcatattttcccaagccttctcttctccaggaaacaatgcctagcttgggcaaaattatggtttctctttattaggaagaatcccagtttactctcatttccacacttattggagcttcaggcaggattaacctttttaacaactgtgacacagccaaatcctaataaaccttccatcaaaacttccaagttcttctcagtaagttctgtcttctcatgctgtacggatgcagtacagtctgggacccaaatataggaccttatgcttatccataaaaagggtaaacttatgcaatctggcccattacttttatcctgtcaagagcctttggatcctcattctgtcactcaaggcattcactattccttccagttttctgtcactgacatgaaggatatgagtcaagttttgctgggacccaggactgctgaaggccacccaggcaactttgctcctcctctctgtgacaatcacacacatgacttagaatggccacgtgcaataatccacagtcgggtcagggagagacgagactggggcctgaaaatgaagaggaatctttccatgccctgaagctgaaatccaaaacctgagaccttcccaaagtccagcagtctgcctgcagaaagaaaaccaaagggaaagaaagaaggttgcaccacgaagtgagtcctggcttagctgcaaggactctaggagtgcgcagaaaaggagggtgacgtggtaagacggaaaggtgacagcccatgagctcagcccaactcacagccagatgctctctactcagatggagcagatcggtttcagcatcgggattaaaaaaatgggcacgtgcattttatggtaggtgaattgtaccttaatttagaaagagagagggggaaggaaagaaggaaaaaaggaaggaaggaagggagggagggagggagggagggagggagggagggagggagggagggagggaaggaacttgtacatatgatcaacattgcaagccttccctattttcattcaagtcaatgctaaagtattgatgattaagtcaatggtgaattccattagagacatttcttctatgttgagattttactaatcataattttataaatacagctattataacagttacaaatccacctaactggactattactgatctcagcagagatgctatcaaacatctctattaaaacaggacagtgtcagatcactgatgccccgtctcacggtcccataaaagaccaacccaataggaccttagacaggcaaacccaaattaatttcaatcgagcacaaaacacccttttaataatttcctgacgccttcgagaggtccccattgctctggcgactgtcctgacaagcccacctcccatctctcacccaggtccttctaaaaatctcagcctggtgggctgtttgtctctgggcacactggtgcccagggcattcctgcctcttccctcctagacaagtcatctgtgatcatcaggacattctcccactaactcttgcaagctcacttccctttcagatgacatcactgcctcacactcatctctcccaatgataagtctattacgcaaaaatgtattactcatcaccattttttgagatggagttttgctcttgtggcccaggctggagtgcagtggcacgatctcggctcactgcaacctccacctcttgggttcaagtgattttcctgcctcagcctctcgagaagctgggattacaggtgtgcgcccccacgcccagctaattttttatatttttggtagagacggggtttcgccatgttggccaggctggtctcaaactcctgacctcaggtgatccgcctgtcttggcctcctaaagtgctgggattacatgcatgagccactgcacccagccacaagcttcttttttttttgagatggagcttcgctcttgttgcccaggctgaagttcaatggtgcgatcttggttcactgcagcctctgcctcccaggttcaagagattctcctgcctcagcctcccaagtagctgggattacaggtgtgcgccgccatgcctggctaatttttgtatttttagtagagacggggtttacccatgttggtcaggctggtctagaactcccaaactcaggtgatctgcccacctcagcttctcaaactgctgggatcacaggcactttgagccactgtgcccggccccacaagcttctttataatattacttaatacacttatgcatttccagccttaatatggcataacctcctgggtcatatcctggctttgcctttaggaatccaacctaccccaggaaagctctctcatttgaatgaggcagcagaagtcccagcccatacatgtggataaaactcaaaccaggaggtggttcaggcagaactccagcagcctcaagaaacacctgtgaggagtgctgtggaaagtagtggctctcagcacaggctcacgtcagaactgtccagcagctttaaaaacacccgtgcctgctggctgggacacactcctcaggagatttcagtacacggcagggctgagaaccaaagacctaaatctggagccctcttgcctgtgactcttttcttggtgctgggaaggaacatgtggtgggtgagctggtgggtggggggtgttgttctggcttttctgagcaggtatatttttttttaacagctttattgatatatacttgatatacaaagagctgtgtacaatctgatgagtttggtcatatgcaaacacccaagataccaccacaatgaaagtctaggcataatctgattacttgtaatattgtacgtctgcgagaaaataacatttttaatagaactttcatctttccaaacacaagattttagaccattttatctgtcttgctttcaagtcaaaaacttcacagacctgactatgaactcatggttctttctttcctgtcaacctcagttggtaatccacatgatgtcagaattgtcctcctggcctgacatggtttccctgacgggcagggaggtgcctgtgtgttgagacgtgtggtcccattttgatgatgtttcaacttttatttggtcaacacatcccatggcgaagtcaaacatctctgggttctaaggagggggccatcactgctttgatgaggcctgagcccgagacgttgagggtgggaagatggctgccctgtcaatcattccttcagagacacagttatcaccagaaaataccttctctgacttgtataaacccaaactagttgcattcagggtggcatacaggatttacctagggaaattttacttgtatttctaccatgggagaaagcattacaaatacttactaaaatcactaatattagcagaccaaatggggtaaaaagtgctcatttctttgccattttaacccttgaggagctgctgccttggagcccagatgcacccagagttaaagtgaagaggtgaggtaagatggaccaagaagctcttaaattactgctgaactttggtaactacggagttttttgttttgtttgttttgacacaaggtctcactgtgtcacccaggctggagtgcaatgctgcaatcatagctcactgcagcctcaaattccttggcttaagtgatcccttcacatcagcctcccaagtagctaaaaatacaggtgcacaccaccacgcccagctaattacaaaaattttttctacagatgaggtttcactatgttgccaggctggtctctaactcctggccatagtgatcttcttgccttagcccaaaagtgttgggattacaggtgtgagccactgcacctggcccagagtttttgaaactccacctttgtgtttctggggtagaggttttccctctttctcctttcagtaaactgctgatcatttaaaattagttctattcaagcctatcctgaaaaacaatcctcctagtttctggttgactaaatataaggttaaaaaaataaattctggccatatgtctctttcagaaacagttattaccagaaaccaccttctctggaaggtgtttttcattttccatactaaagtgaaaaacagaagtctgcctatgagctcagaagtctgcctatgagttcatagtgagatcctgtctctataaaaaaatctttaaaattagccagacgtggtagcatatgcctatagtcctagcgactcagaggctgaggtgagaggatcgcttgagtcaaggggtttgaggctgcagtgagctagtactgcaccactgtgttccagcctaggtgacagagcaagaccctgtctcaaatttattatcaattttaattttataataaatttcctatcattgaaatcacacaggcatgataaatactaaagtaatgagctgagtttggcaatgagatcaggaagggagatgagattctagtacctaaaaaatctggaaacctacactgaggttcacacctggcttactttctcagctctatttttacttgagttggtcttagtccattcaggctgttataataaaataccacagcttgggtaatttataaacaacagaaattgattgctcatagttctggaggctgggatgcccaggatcaaggcccagcagattcagtatctagtcagggctccctgcttcataaatgatgtcttgctgctgtgtcctcacagggcaaaagagggcaggggagctccctgcaacctcttttgtaatcccattcacgaggacagagccctcatgacttaagtcacttccccaaaggccccacctcttaatactaatacattgggtgttaggttccaacataggaattttgtaaggacacacatattcagactatagcagctggttagctgttataagcaaatgctcagaactcttaagtctacattccagctctggactacatcctgccctcttccacctctgctgcaaaagtgaattcctcactggctccatttcctgggtattctgcaagaactccaaactccacatgcatatatgacattctctgctcagtcttctattgaatctttcccggaacctattcttttcatggtctctctctgtcttcccaaccagaaacctctgatttatttgactccctttacctctatatcgactcttctgtgagatgcttttcatgcccaccgcctgttcctctgccctatttctacaggagttggactctgtcttgcctttactacaaacacaacctcctcccctttagaccagaggaccgtgtcgtcatactgttcctagaccaaaatgagggtcaggctgctatttcttgtggcccaataataagatgcagatgaactggggaggaagagaatttttatttctgcaaccagttactggtagaaggcctggaaattatggccagaccaactcaaaattacaaagttttccagagcttatataccttctaagctatatgtctacctgtaagtgtgcatcatctaaagacataagtgattaacttcttttacattataactaatgtctgagtcctcaaggccttcttctggagcctcagtaaattcacttaatctaaatgggtccaggtgctggggtgattacccttatcttgtctcctactaaatcacaagaggtttggggagttcattcagaccgcaataaacttgtttgtggaggcctggggagtttcttcagacaccaaataaaacttatttaatcctaaatgggtcatgttaagaattccttcattattttgtcatgctttaaggcccaggaaaggcctaggcaaaactcctggtgggcttttgttacatcccagactttatataagggcactggcttttttttttttttttttttagcttttaatatttaacttaaccactcagtcagtactgaaacacttgttatggaggcctgtgttggtgagacctggcctgccacaatgctgcatgcaggagggagtctcagcccctcagacggcgtttgagactcttcttgctaggcttctccctctttttcccatctcatctcctgccatccaccaggcaccctgaactccagccccatggtccccactgcaccctgcaccttcatgctcccatgcctgcactcctcccaaagtctctgctccaccccgcttcaaagatcagccctgtgaggtctctcccaacaccatcccctgccctccccaatctgtcctgctcctcccttggcaggacccccatttctacagttctcaccatgtgcaatattgtggttaactgttagaggcctctgtcttctacaccagacatgaccttgagagcaaccccatctcattcctctatgcatagtccaggtatccaccttggtttcagaaccttgtaaaggttttgacttaaacagaagggatgttgcagcagaaagggaaatcagcaaagatggaaacaatatgaactcaaagcatacaaaggaaactgattaaaatgttaacacagtgctggcggggacagtttgaaacaggtgctcccaggcaatgatagcctattatcatgatgaccctcagggagagcagtcggacggtatttagtagaatataagtataagctttgattcagcaattcaatttctgcaaattcactccatgtaatacagccagcattaaaatatatgaaacatcataccaaacggaacttttaaagactataaatagcctcatgtctgctcaaatatgttcttgctaccaagtgaattattaaaaatttgtttaggagcacagcttaaaattttagaatgtgaaagaaaaatatcttgaatccccaaatcactaagctaaaaggaaaattcaagctgaaactcctcagggcaaacctgcctcccattccattcaaagtcatcctctgctcactgagatagatgcatattctgattgcctcctttggaaaggcttatcagaaactcaaaagaatgcaaccacttgtccctcacctacctgtgacctggaagccctctccctgcttccagttgtccctgcctttccggatgaaccaatgtacttcttacatatattgatgatatctcatgtctgcctaaaatatataaaaccaagcagtgccccaactgccttgggcacgtgttgttaggacttcctggggttgtgacactggtgcacatcttcaaccttagtaaaataaactttctaaattaactgacacccgtctcagatttactgggtttataagaattacagacaaggaactgagaaccttcaatagttaaacaaaacaaaaactcctaaatatagacactacctgtataaatgaatgatgaggcatccccaggaaatattctgctactatcaaaaagcatgaggggctttgtatactgatttagaagcatagtcacaatgtacagttaaaaggaatcaagctcagctgggagcagtggctcacacctgtatcgcagcactttgggaggccgaggcaggcggatcacttgaggtcaggagttcgagaccagcctggccaacatggtgaagccccatctctactaaaaatacaaaaattagctaggtgtcgtggcacgtgcctgtaatcccagctacccaggaggctgagacaggagagtcgcctggacctggaaggcggaggttgcagtgagccgagatcgtgccactgcattccagcctgggcaagagtgagattccgtttcaaaaaaaaaaggaaaagaaaaataaatcaaggtcacattttaggggtctaaagttcttaagcagaagatcaccagtgaaaatttctccctgttatagagacggtgtcttcaacttacaccaggaatcttcattgataaatccaacaagaactgagagaaaagaaattctgctcttgaatatctgccccctccaggctgcaacccgaaggctgtgctccatctcctgacggcaaaatagtgagggtctgcagcaggcgtatggagcactcagctagggaagcgcccccgcccccattgccctcttccacgcatcctggaaggccccagtgctgcaggagagctcagcgaaggagtccagctgacttctgcacagaggggcctccccatcaggctcagagtctgtccacagagccataaagggcacctgctggtgagaggtgaccttgtgtccagggagcctgggactgactctggcacctgcgcccctagcaggcaggtaaagtggcccagcggtgctggctctgccaaccttgtctctggatcttgatttgacacctgtgaacagcacttcatccactcacagcattaattattcacagcagagaaatgaacccagaggcagccaacaacacagggtaatataagcactttaaaaagaagcttcacgctccaacaggaaacttgggaatagggcctgaaagcagcctggtcaaaatcgatagtgctggcaggaatgggctctgcctcctgctggataagccctggaccctgggctcctccaggacaggccctgcctccctcatcgctaacttcccatcatccctacacactggctccctcccacttgagtggtgctctggaaattacaggtactaggtaagccatgacactgatgatcgtattccttaattctgtttcatggatcctatcttccccttatccagcggtttgacaacatgcagccatccattttttcccttccatgctctcctttgagcttggcagtgtgtgaattccctatcgtctcagtggagttgacttccgagaagcttccccacattctttccttcagtggtacctagatctgaaggaaaaactaaaataagtgagcaaacagaacacccagaacccaaatgccctgcagctctgccccatccatgtgacagccagagatgtgacctagtcatgcaaaagacctctaaagatgctgcaggcccagggagacttagcatctcctggtgtcagctgccaagtcagtaaaactagatgaggatggtcttagggtttcccggcattctgagaatggaggtaagtaaagaaccacctttggggccaaatcttttcctcttcccagctcttcaaagggccacagggctattttcacttttaaatcattggtgtcaagaatactcaaccatttctaacccaccctcaattttctgggggacagagattcatttcaattcacagtaacaagaaatttgcacatctaaatagccagctctctctggcttattaaagtcacatgaaacagtcatcgtctgaagtctgggtaactgtcagaaagcacctgattatgtctaaggagccacaagatctggtccagtgaagccaggctcccagatccaccccagcgtctgactgggagcggcgccctttctcacatcatcatgtcagtaccaagacctgcagaagaaaaaagactcactagcttggaaggagagatgaggtggttgctttgtacttggcaagcaggctggacccttaatgagctaaaatccatctcccatttgtcgcttgtctctgctacaacacacatgcctgctcagtcattcatcttttattttctaggctataaattattcccagcagccagccagggtgttgtggaataagcgggatgagacccttgaaggtgatctagcacaggaaacgggggcccagagaggttggacatttgcccaagatcacactacaacctgatggcatagcaggtctagagacgatctcttgaactccagccccttaaatattttccatccccaaagaatgctttcagaatcactccgtctccaaccctccttaggccaccatttgtctccgttactaaaggtatactgagtgccttctatgggccaggccctgaagggcacagaaggtataaaaatcagcaagacaggctcccagtctagggaggagacacacagatgttttatttcagcaacagtaagtccagggaaggagcatggtacccatgcaccaaagaggggtatgggccacagagagggacactcatccccagctctctggagatgacaccgcagagtgcttaggcaagcactccacaaatgtcagccattgcattcccaggctgtgtatctggcagactctgtgtctcagctagtctaggacaacttggggccatcctctgctctgtcctgctgcaaaggtagatgcaaagaagtgggcagtctcagctgtccttgtagtgagctggggccgtgcagtgctgctggaatgggttctgcctcctgctggataagccctggaccctgtgtaacacacttgcacctctgtcagctgtggaggagcctcccgaggtctctgtccacaccctggcatacaggcacgccctgtcacctccagcctgctgctgcctcccaagccaccgccctctctctgctcttccgcacacccaagtcctctcaggggtggtggctgtaagctgggtggcctctggggggctgaggagcacctgggctggaaatctcaatggagatggtgacatttcttatagtcactgctcctgacccaagaggcctcccactacccacaaagaggtggtggtgtccattcaggcaccgaggaaggcccaggtaacctctggcagatatcaaagatgggctgggaaaggctgcctcccacagcgtccccaagagcatgactggcagcgaggtgagtttgtcccctgcagcagaggtccccaggtaaaatcagcggacccatcagccacctctgggcacagaacccccggtcttctccaagctcagtgttaaaatgtgccaaaggaaactgcaaatattagggagaatacaggcatcccaaatagtgactgagtccttactctgtatctcacatgcacagtagtatttatactgcacagcaacccagtgcagcaggcaccacgaccacaccttttttaagaaaactgaagccgcaggctgaatagcatctggagctacctcctcccatgccactccacttcccctctgtgccacaggagcagcaggcacagcctctgtgacagacaggagctccctgtcacctgatgaggaggattcaatgctccctgcagacacctgaacatcggactgagttcccgcatgtggacctgcgtctaggctcttctctgacaaacgccaccttagtcggcagcactttctggactgacagggaagtgtgctgtttgctgctttggatcctgcaggacatgctcctcggtcagttcctacctttatcttctcatctctgggctccaggaagctcacacggtggcccctgtttcaggccgtgctggcaaaggagctgaggaagcgaggcccaagcagaagctcaactcgaggagagaatgcaagccaaggggcgggagctgctgaggccacacagccacttgctatttttaaatcacatgttactaagagcagacacctagtaagccctgaaccaaagcacagaaaggcacattttaatcagagctcttggaagggcagcttgcaacaggaaaggcaggtagtgaagggaagtgaagggggaaagaaacattactggagggaacaggaatgtgttgcttttctgttcagatcccaaagggtctttttcttcaaaaataagaatatcttgtttatacatgtaatacacagtcttccagaccaataatggaaaaatatcaaattaaggaaatgaaataaaccttgaagcaggacagggtagaaagagagagatcatttagcacaaagaaatcagaagaggtgagagtaattttgtatgtctaggtagctacagtagaaaacctacatttcattaaaagagctcagtctctgttagcttactaactggcacgctgaaatgaaatgcagggacaggcagagtagggagaaggcggctgccacctgggatttccggtgagacaaaatgaaatcagattatcaaatataggagtaaaatctctacaacaagtttgcaacctagatgttccctcctcaatgcattccgcatggtgagttacactcacaaaacagaggtgttgtttgaaatatattttctgcaggggaaggaaagaaaacaacctctaacaaaataggacaccaccttgagtcaacatatttgtaaggaatatctgttttggagaatcttagcactttacccaggtgaaatgaaatgtagaatatactagaaatgtactttttagatgagatccattacatatatatatatatatatatatatatatttttttttttttttttttttttttttttttgagacggagtctcactgtgtagcccaagctggagtacagtggtgtggctcactgcaacctctgtctctggggctcaagcgattctcatgcctcagcctcccaagtagctgggactacaggcttgtgctaccatgtccagctaatatatatatatttttttattttagtagagacggggtttcaccatgttgcccagggtggtctcgaactcctgagctcaggagatcagcccgactcggcctcccagagtgctgggattaccagcatgagcaaccgtgcccggcctaatttaagtttttttttaatgtgatgttgaagatgcttcagaaatgactagtcactctcacatgactataccactgctgcatgaggcataggtaccttccctgtcctgcacaccacaacgcaccacaactgacacgtcgtgggccctccacagacacctgtggatggaatgaatgaagtgcagccatcaccatccccgggacagcaccctgcacactggccatgtgtccagaggccaggccggcagcagtgtgcaatggcagcccgccagcctctcctgcatccccaccgcctgaggcccccagcagcagggcgagctgggctggatgtgagtctcctgtacctgcactgccttctccaccaaggcagcagaaaccacagtgggcttcagagatcaaaaataacgtacccctcaaggttaactctagggcagctgtgcctcctgcaggtcaagcacttccagtaggggtgtagccgccgtctcttgcttgcagcagacctctccttgagcaagactggatggagtagaatatagctaagcaatttctactcattcccctttaagaaaaatgcttcatgaccccaacttgatggacagtggagaagacagctttggagaagacagtttttgagtattaaatatctggaccggtgagggtattggacaagccaccccatgtgtgctggctggccccaaaaaaacaactttctccttggcaccacactgggttcactgctgtgtcaggacactgtcgtccctcgcatgtgcagggaagtggcacactgagtctatagcactaatctcatgagcatatgtaacagagaggtgagctggccttgggtaggttatgttcttatgggacttctgcactggccgtgtgcaagtcctgtgcctcaaacctggcaggtcagaattcgcagtcacgtcttacagaggaagcagctgacaatgtcacagagctggtaaacaacagagtggagggatgggaaggctggtgctaggcagaggtggggaccgcacatgcagggaaagtgcttcatgctactgcacgggtcactttaaaacggttaattctgttctttgaatttcacctcaattaaataaaaaagtaacagagcaaatatgtgaactctgcacgaacatgattgcaaacatcaggtgctacacactgggccaggcagcagggttatggaatgcacaggccacggccccatactgaagcactcgccgcgtggtggtttgctggtgttgtcagcattctctcacagccaaaacagcaggggaggaacaaacttttatggggacagggaactgagtcagaagaggctgagagaactggggaatgatcaaaggtcccctacatgggttggcgctgctgactgcatggtgggaactgcaaggaaatgcatccactcaacatcaaggatggccgctgtgtgccaggcactatcctacgcttgttgggaagccaagtatttataacttgttgccctcatgagattcacaataaagaaggaagataaagccagacgctctcttgaaagtctactgttaaaaggcattgttcctgatggttttaagcaaaaaagtgacatggaaatttacaaagacgtgagaactggacaggagaagaggctgaaaggagactagctagaaagtttcggcaatggttcagagggacattcacagatgtggattcgggtgaggacactgggaacagaggggagaaacagaaagaccagaggcagaacagagaagactagtgggtggggctggggtttcctggcatcatgagatccgaagaccttaatttacgtacagggcacaggacaatgccggggcctggagtaagtactcaataactgttacctgctggtactctcacgctgaacttcgtgttctcatggtgacttcacttttccatttttctggacagtgcacctagggagctctggatccttctccccaccattggaagagaaaagcgcgaaaggaaactgggccacaggactgagtgacaaaagcagggcttgtcttttgtatcccctgtctccagttcaatgcaatgcaaaacactttcaaaatatgcagggaacaagtgaatggataaagaacaaatgaacaagtcaatacaagaacagcaatgacctctgacgcccaagctctgacaaagctgatctataaaacaattggagaaatagggttttaaggaagagcacacaggaggaggcgaaaggtccacatttgcgcaaaaagctaaacaaggaaataggcgtactgatgaaaattcattatgctgagaagaaccaaaatattttctcttcctgttatcccacaaccacttctcttcaacctgacaactctgtaattagagcccaagtccttatgctgctgttttattttccaagtggggtctgtctttctgcagctgcagaggcttccttccagggcccccacgccatggggcacactgactcctgcttgtcagtatgaaaccaagatgacgaacatggccagcttccgtgtgctttacccgcactcacagatacacagcccttccctcctacactgggctcctcaagaatgacaggtaagaggctgggcgaggtgactcacgcctctaatcccagcactttgggaggccaaggcaggcagattgcttgaggataggagttcgagaccagcctggccaacatggtgaaaccccatatctactagaaatagaaaaattagctgggcgtggtggcacacgcctgtaatctcagctactagggaggctgaggcacaagaattgcttgaactcaggaggcagggactgcagtgagccgagattgcaccactgcactccagcctggtgatacagcaggactccacctcaaataataataataataatgacaggtaagaaaaatgtatgttctggcagattaaaaaaataacgcgttttcctattattatatatctcctatccaattaccctatatgctagaatatatagtgtttctgctagactacaatatatatgcctgaggaatctcaggttttacaaaattcaatactaaaaataatagagctttcgggaaaatttggttagggcattcgactcaatacctaaggaacttcaaaacagaatcaaaaacagtgactgataacctggagagttaatgtggtcactgaggcaggtggctccacagggctggtggctaccacagcagatattacaaacacacgaaaacgacaggaagaaaatgcagcaatgccctcattacagaaagactggcagacactgagggggcactggaaggattataacccattctgagccaagagccatgagaggctgtgacagcagctctctggcgaggaggcctcagagacaggcgatcattgtgatttcctacacatacgcacagacacacacacactgtcacagtggctccgctgaggactgtttcttgtcctgctcaagctcataagtctgctcctatgatcctttctctctttgactaggaaaatgtgtataagccaacataacttttgccttccacagacatctcgccccctttaaaccctcacatgtgagctcacctgcatcacagaacagggcacagaatttcaggctgtcctcaacgtaactggtctgagtgggccagacaccacggtgaggtcacctgctcatcccccagtgaggcaagcctggcaccgcagcagaggctgggccacgccgggctttccccatcccacacccagaactttagcaagacaattcccagagaaaggtatggccacagaatgaaaccacagaaaggtgcaaatacttacatataataggttggatagagtccttcgaaataccagcaatgctttttggcttctgtgcactgcaaatagaagcaagaaaaagtttgtcagtactcaggaatctgcatgttgttgagaagctctcacaaaggcagaaagaaggatgagaagacacagcttaacccatgaaaagctgggatatcggggcagacaatgcattacagggagagccgccccctttctcatgactttctatttctttaaaacatctatttttctattttttcatagcctttcatatctctatatacactgagtgtcagcattttattaaaaaggtaaattaaagacaatccactgtttaaaatgtacttggtatgatacttcagattacaaaagaatgctagaaataaagcactgcaaagattgccactgccccccaatttctgttttagagagacatctccaatagatttagcatttctagagctgtatatttcagaatatgctaaagccgcattccgacctacgtctgcaagatgctgcgagtcacggttcactcgttgccctctcacgtgcaggaagagaaagaaggaacaaggaaagacaatgggagcctctcctgggctttccaggtaagtccagctcctaacatcccggaggcagggcccagccccacagggcagggcagggcagggcagggcagggtgggtgagtgcacacaggcatcggagcaggggccagatgccacctggaggctctcacaaacctccagcaagtgaggcaggccagcatccccactgctcagggagctctctatgcagagatgctcttcccatctgaacaaggcttttctaaaattattccattcgtgctgtcatttttgttttacattcacaacgtcctacttccatgatctagtttattggcccccatgtgtaaataaaaccttcaaaacattatggtgcaaagctcccagcagcaggaacactggcaaagggacggcaaacaaagctttctttgggtgaggcagggccgtcctgcccaaagcccctcctccggtgggagggtggctggatcagctccctcctagcctgtccgcagccccagcaggtgtacagcaatgccctcctgccacgattgccctgcagctggaatggagttagagacaggccccacatctacagtggcatgccatgggagaggtgagtgccaacgtcacgccagtgacattcgatgggttatgaaaatgacatgaacccctggattttggagaatgtgctttaagacactcagaagcatactcaggcagcctggagtgacctagttttattaacggaaaatgagttttatttagactaggttagctcctgtccagtttaagaaatgaagctcagacagctgacgaaatcaatttattttggcacagaagagcaatttcaggtctctgccccaaattataattcatttcactagagtcttctgtgataaacagagaaaccaggtctgccttccatgtgtcactttaaacaggtctcccttattctccatcaccgccaccgacagccaaacattcctggaacctgacacttaagttccacacaatcaagaggtgaggccagggaacatcagaacacaagcctgaagctccccacctgcctggggcctggctgctccagggctgctccgcagagacaggccacagccacgcagcgagagccaggtgcaaagggctggcactggaaataaggacaggctctggcctccatagcgcccttttctgcaattcctcttggtctaaagcattcccagatccaaagcagccacttgatactctggcagcacatctccatcactaatgcactgcatttcagaaaggactttttcttccaatcagacaaaataatgccacacttctgaatgaacattgtctctgggatacaggtatatgaggaataccacttcacaaattaaggcaccagggcccttggtgggtgtcttcttctgggtcacacagcttctttgtggtggcaaaacagagagcccccagcacagtgtcttctggactcacgagagctcccctgaggaacccactctgcccacctccagcaagaacaaaggcctctgaaaactggtgtgagatgatccccaagatacagtgttagtgaaaaagcataggcaaaaacaaaaacatacgtccagtatgccatccttgatgcaaaaggaaacgtgtacatttggcctgctttacacaaaaagaatcacagtttgcacacatcaaaacatcacaggtatcccataaatatgtacaattattacataccaatacatttttttttccaaaaaaaaaatcacaggaaggacagagtatgtgaaagttgatcataagaactgggtcattcttgtcatacccaactaacagagtcgaggccagaggggcaaagcactcaggtcattctcggcaagcctggctgctgaaactgcctgccctgactctcagactagcttacccagccccatcacataccagtgagagcttgcacaccaatgagagcttgccagctccccaaaactttacttagtgccaatgaacaactctctttcaaaacaatcccttacatttctcctttttataaaacttccaaacttctctttgttcttcacacatactgaagaccacccagtacatggcccagactgcaatgctcacttcctaaacaaaatgttttaaatttagagatctgtctctgtaaaagctaatgaaaatgcttacccgtggagggtgggtggggtgaagtggaaaagacaaggacaagagcaaaattcttctgagtatatctttttatgtagtttgacttttgaaatgttttttcagataataaagtagaaagtattttttaaaaccacttctcagactgaaaagattataaaagactatcatgacatgatcacacatgtcccctttaggccaggggcaactaagcagggtagatgcctgtgaggtcagtgctcacaggagactcacacagacactcactcttctgggagcccttcctggggccctcccaggtgaagggcaccatttccatcctactcttcttcccgcatttttctggcatattccctaacttcagagctgcctacttgttggttacccttgctcagttacttgctaataaccttttatcatttctcactaagctacccaaatgaatcatattttgaaaaatttaacccgtttgttcctttacaaaaactattcttaagaaaatattaaggctacatttcttgaaacagaaagcacctttaaacagagttaccttgcattaaagtgtagctccattttgttgctgctgaaattagtgtgtttgaaatttgctaatatcctggaaactgcttcactgtttttggtagctggacttttgtagcagctttctcctgaggaatgccaacatcgtaatactacacacatgtactaactcactacagttaatgcatggcatgattccatttgacagccagataatatgaagaatgcaaagtcacaggtctcattattcaactgaaaaacgccaaaatgaggacacagaagtcctgataattgttgttgttgaggctttccttcaataaatgcttgctaactgaacaccaggtgtcagagtcagcttgcccaattgaggaggacgcagcctcgtgatgggaatggagaccaggaggtggagaggcacacgcctgcctgaggagcccagggttgagagccgggtgctgccaagtcgaagtctgatgagaaaggcagtctctgcctaccaagtccaagctccaaatccagcaccagcaccaggactcaggacaaagccagacagctagagctgtggtcaaaggggagtttgccagggacaaataagagggatcttcagagtactcccaatcaccagcaggcacgcagatatggcctcacaagcaagcgggaagaggcagaaagaaggccccgtgctgggtcacgtggaagcaccagagtcgacgggcaaaggggaacccacagggaaaggaggagccaaagaaccagagctctgtgttctgaccctgactgcaacctgccagccacaccgccagccagtctgggtctcactctcctcgtttgtaagagtacagactctcggccgggcgcggtggctcaagcctgtaatcccagcactttgggaggccgaggtgggtggatcacgagtcaggagatcgagactatcctgcctaacacagtgaaacccgtctgtactaaaagtacaaaaaaattagccgggcgtggtggtgggcgcctgtagtcccagctactcaggagactgagtcaggagaatggcgtgaactcgggaggcggagcttgcagtgagccgagattgcgccactgaactccagcctgggcgacagagcgagactccgtctccaaaaaaaaaaaaaaagagtacagactctcttccctgctttatgaagaaaatgagattgcatcaaaatgcctggccaaactagggcatcgtttcctgatcccacaccagctagcacctctgtccctaattgtgtcttctctggaacaaacaacttccaaggttcatcttacgtggtactcgatcatctaggcagaagcaatgctaccaaacctctcgagaacaaaggttctaaatatgtaatccttacatgtgtacggtatttagttttccaaaatctccctaaaaggaaaaaacctctctaaaaaaaaaaaaaaaaaaaaaaaaaaaccttaaaatgtatggaaactaagggggaaaaaagtgaatttccaggttttatgcccactctgaaaagtcagtctacccacattttgcgaagatactactaccatgatttcttaaggatcaaccatctctggaaacagaaattatgtgtgtgaggagaggtcaactgctttctgttacctagcaggcatcctcagttttcaggatgttgtcctgggctctgggaaaacagcagccctgcatgagcacctgtgggatattccctctgtgtgcagagcagagacaatacgcagagccacatgcttcttgaagagctcatgaaaacagtaacatacaacttacaaactatgaacacggcagagggtgtgggctcacaaggaaaccttcaggagcaactcccttgaggggatcaacagttcacactggagaggcctgaaagacgtctctgctcaaggaggactctggacgcccgtggttcaaggactagggtatctatatatgtagttaagccatcccaaatatagttatccctatttaggcaggatctaaataagccccagagaataaacccttgctgatctccactagtaatcctcatagtgacataaattactcctccatgtgcgctgagtgaggaaggacgcaggacaacactgatgttgagtgcttctcccttttctatcccaggctaaaacagagccgcaccacaggcaggcacagctgacttggcaggaactgaagctcgtgactctgggacatgagggagtggacagcagggtcaaggatccaaaacaacatggattttacctaaattccacctgttctgcttttcttaagttcaggggataaggtgagatctttagataaatagcagacaaacttgcaaaccagcagctcactgacaggacttgtctcactgacctctggaaagtaaggatccttatgttacttatcacggcaacggctttggccaacagtctgtcccgggccagaagtccagggtttgcttcaggatggtgggacggccccaaagaagatcagcccaaggactccatctttttcaaaagggaggggccccctgctgtgcctcacactgcttctgcattcatcaaaagcagaacttgacacacaggcaatgagatcccagctgctttcagcttgagcccaattagagtgggctcgttacactccgcacaggctgagaacaaagggagcctcatgggtgctggcaggcttgatgctcaggaccagggacagaagcagagggcagggggtagcctgctcaatgcagagagaaaatctatgcagggaatgacaagcaattatctcaaggtctctgaatttcaattaataaataggaccgaccatgctttaaattcctgtactggaatttcaatcagttccctaaatgctaattacttaatccccaggtttatggacattttgtttctcaggaatgtcttatctccaagaaaccttgatttttttagagatgagagtatgaggcttctcacaagcaccatttcttagagggaagaaagcagataaacccttaagaaaataacagaaataaaagatacccctgtcttatagaagaaaccacacctgaaattcacacacagccagcaaataacgatcagagatgagatccggggatgcaggctgtaaaccttaaacgaagcccaaccacagatccccagggaaattctgtcaactctcctagactctgaacagctggtctgctttacctgctttcgtgttcagcagaaggacaggggaggagacctcctcatggaccctcattccagtaggtaaaaagcctcatccccagcaggtgacaattaatcagtaaccaaacttaaaaggtagaagcagaggaaactacccaaatagggctgatatctttatcaataaagacttacatgattcaatgagaaaaagaaaaattccaacaggaaaaataaagtgatagatatgagaatttttcaaagaaacacaaaaggccaataaacctattttaagagacaatattcattaataaccaaatataaattacaatagtatggtttttaacccatcaaattagtaataaaaaaatcccagagtaccctttgcagacaagagcataagggaaaaaaaaaatcacataattgttgggaaaataaaatgcctcaagaagacaatttttcaatatatatcaaaaatctttaaaatgtatgtaatttcagcaagtttaaacaattgagaacaaatgttatttaaaaaactagaaataaccaacattttcaaaatgggttttgctaacaaaattataagacatccaaaagatgtatttgtaggtatttactatcagaatgtagacaaacataatgaggaatattttgctaagaaaaaaaggtcaataaaatagtacatctagaattgtattttttgttatacattataggaaacagaaaataatatggaaagccatgtaccgaaatactgacaactaattatgtttcagttggtactagagatgattgttttccactatacattttgttagtctccaagtttcctgtatggaacctgtacattttatttttaaatctctattcaattttactttaaaatgcagaccacttagtacccaaaaaagaagtgaaaactggatatgaaaagatatttaaaccagcctggtcaacatggtaaaaccccatctgtactaaaaatacaaaaattagctgggcgtggtggcgcatgcctgtaatcccagctactcgggaggctgaggcaggaaaaatcacttgaacccgggaggcggaggttgcagtgagctgagatcgcactactgcactccggcctgggcaacagagcaagctctgtctcaaaaaaaaaaaagaaaaatatttaaaataagaaaatataactgttaacaagaaagaacattctccagctaggaatgaaataaaaataataaagtttgtgaaataatatacaaggctagaaagggtgtactcaaacaaatacagagtcagcaattaaagctgtattcatagaaagtttatcatggaaaatgtttatgtcatagttaatttaagacacattatatatatttaatttcaacaatgtaaaaataaacatattcataggagaaagaatgtaacagcataagcctaaattcacagtgttatatttggatggtgtgatttctttttaaaatatctccctactgaagccttcaattctgatgatagaggctgttgtggcaagagacaagggacacataagagtcctcaatgggccgggcacagtggctcatgcctgtaatcccagcactttgggaggccaaggctggcggatcacaaggtcaggagatggagaccatcctggctaacacagtgaaaacccacctctactaaaaatgggcgtggtggcgctcgcctgtagtctcagctacttgggaggctgaggcaggagaatcgcttgaacctgggaggcggaggttacagtgagctgagatggcgccactgcactccatcctgggtgacagagcaagattccgtctcaaaaaaaaaaaaaaaaaaaaaaaaagagtcctcaatgagtgcaaaagactggattcgctgcaagacccaacacacatgtgcacccaggagctcctactcatgcctgctgaacaaaagcgttctgaaaactatgctatcttttaaaacataattatcaatataaatcacaattcatgatacttgaaggatcaggtgatccaagttctagctcaatttacttaggtttagtttatacactataaaatcacccattttcaagatatagtttgatgagttttaggaaatgtatacagctgtgcctccaacaccccaatccagcttcagaacctttccttcacttcagagagttccctcatgttgttctgcagtcaattccaactcctaccccagcgccccaagcaatactgatctgctttctatctttatccatagtcttgcctttgctataaggttcaattaaagaaaatcatacaacttacagtctcttacgtctggattgtatgttgctgcatatatcagcaattcattcctttctagtgttgaacaatattccattctatgaagacaccacattttgtttatccattcaccagcctatggacatctgggttgatactgcattttggctgttatcaataatgctgccatatccatttgcacacaggtccttgcatggacagatatcttaatttcttgggtacatactaagaaaagtggaatgggtacgtacattccactccaagacctggagtggaacttccaggtcacacagtaactccttacctaacttgttgagagactgtcaaactattttccaaggcagctgcactactttacattcccatcaacaatgtaagagggctccagtctctccacatcatcactaacacttattatctgttttttgatattagccatctagtactgtactggtatctcatcgtgattttaattggaatttccctaatgaccaatgatgtaagactcttttcattccagctcaatcagaaggcaaaaaacagtagctgccatacatggaatgcctgtgatccactaggtgcttttcatgtgaaatctcacttaacattgtaacaaccctgagagttaggtggtttacaaaagagcaaactaaggtctcgaagaggtgaattgacttgcaaaggtgacacaggagcaagctgaaagtcggcatttgacttcaggtctgttggtttccaaagtctgtgtgctttctgtggcaatgtctacaagctgaagttttctgtgtcatcataatccacgacccaccctttggaatgtctgtcacatcgtgtgcatggaacaggaatgagatttattgtaggcattattttgctgtatagaagaaaactaaaatgactgaatccacatgaaagacccgatctccatgcccccaaaataaccttttatgagttattaggaattctacctttcagcattcctcacctctcaacactgtcaattactgcatctccaggagcagaaatcaaacacaagtgtgtccagcagctttgctaaggaaactgtctctgcaatcagcatggccagcccaccaggaacaaaccacaagagaaaggaaaggagcaaagtcaaggagcccaaagcccaccagggtgcaaaccatgaagcatcctttcactctcagaaatcactttttagatgccaaaaatacttagaggtgccattttaggcacagaactatataaaatgaatataaggcctgcagccaaaagggttcatgtgacaaattttccaaatgccacaaaacatcattcattcaaaaaactcatgagtgggagacttcattagaatagcctgaaagcagcgataacagatagaaatatcagtgctactgttatctgctggcaataaatgaatatgataaacctttgttatcagctcagttccaacaaaagcaatgaacaggaccaaacctttgaatgctctccttaaaggcctaatccagaatttttttttttttttttgagagggagtctcgctgtgtcgcccatgctggagtgcagtggtgcgatcttggctcactgcaacctctgcctcctgggttcaagcgattctcttgccccagcctcccaagtagctgggattacaggcacgcgccaccacacccaactaatttttttgtatttttagtagagatggggttgcaccctgttggccaggctggtctcaaacccctgacctcaggggatccgcccacctcggcctcccaaagtgctaggattacaggcatgagccatcgcgcccagaaaaagtcatctttttttgatgtaattgcagagtgcaagagtaacattatgaaaaaaaagtcaacagatcagctctgccacctcctagtctatgatttgggcacccggctttgatgatctcatacatgtctgagaagagtaacaggcttgttgtttccaactactatgcccccaaaatgaaataactgagatatgtaccaaaagactactctcctccagttgggcctaaatcttggccagcagatccaaaactcaaccaccacacttaagagaaaatatcaacttcttaccttttgcagacagaaatgcccagaaagattaataagtggagcagcttcaagggcaaaatgccaaaaaatgcataaggatttttgcatttgggttgtgtactaccctacctatttgacttctattttagaagaaaagtgtgttggattctctgatgacatatatttctgtaagtctagattctaactgtaaagagcacaagaaattgaaaagctgagatgtgactaaagtctgactaaaggctgaataaatgatggtgccacccacatttaaagacaatgtgacttactagaataaacacacacagcacctgccgcatgcctgcttctgtgcctgaacagtgacccaaccatggtcaggtcaccgaaggtctctaagctttggttctttgtctacagactggagagaggtatttctgtcttgccttgaggtttacatgaaacagtgtatgcgaaccacctggcgcatgcccactattctaagagcctcctgctaagtcgttacattgtgtgctgtgtcggtttattcttgagaatcatggtcaagtaaagctcaacctaaagatgcagttaacattctctacaacgtacttttgtgtctctatggagagtgagaatatggaacctgtgatccaaaatgaaccagaaaaacaaacaaacaaaaaacagaagtttagaaactacactagttacaaccaccagcttggaaatgataccctggtgtggaaaaatacagctcaaagcaatctgagggaggctcctcccctttccatggaagttttcatggcttctggcacaccctgtcagcattctcttcccaggaaggtactgggaagcactgccacgtgtactcctctcattccttttcactactaccaaatttcacaccccctcaattctagtaatatgcattttcattaaatctggtaatatttaacctggagtcaaaaagcaatttcttgtgcttagaagactttctatttcttgtcatgaattgattggttataaatgttaagggactaagctgttacagcaaatttggggagaaagagagtcagttccacgtgctgccccaaagcagcatctgtgtatcagaaaatcttcagggagtctctggcagtgtggaggcctaagctaaaaccaggaggactgagaacatatgtgccaggaaggtgattttgatgccagttctgtctctctcctgaacccaatcaactcaatcatttctgtttaacacaaactcacatgagtgcctcctaaaagctggttcagtcagctgcctccaggtcagaccagtgaggatggaggccggtcactcagtgttgtctgtgggtgcatgcaaggggcagtgtggtgctcttgaaaggcagtgcccaaggacagcagcagaaatgcccctgccttccccactcaggaagggcatcactgtccacccacaagcagcttccagagccatcacttataaatatttcttctctcatttagatttccctgtgccaagaaaaaaaaacaaaaacaaaaaaacacctgcctgctctgagtcagcctcagagatgaccgtggttgactgtgctgtctgccatctgcttttaaccacgaaagaggaagcagctatgtgggacaccacatcagggaaccttccggacctagggtctcactgcctggaaactcccctgagcctcagcttcttcagatggaagggactctgctaactcaaagaacccctcatactacccaccaaaggaaagtccccatcagggagactagcaagggaggctgaatgtagaacagcactcaggttaatcctaaatccctacctggctttccctcctcagtcatcaacatagtgatggggtgaacttcgatgatgttgtctggggactgaccttcatatcctctgatcctcccagtcttttcttcttaccttttctcgtacccagtgtgtggtgggtgggtagggaggtagatgagtgaaaacacccacaggaaggaggatggcaaaactcagatccaaaagcaacaactctgcctcagtgttgtaaataagcaacagcttttccacccaaaacaactcatttgtgcaaggtcaccagcaaactgtacagctgtctcccagccctgtcagctataatttctaatagctgtcactgtgtcctggcttgttaaaatccgtgaaggaaatcatttcatgtagctttttttttttttttacgagatggagagagaaaagaatggtagcagagtaaaacagcaagtgcaagcagatgacagaaatttctacagacacttaatagacagacattccttaggcctagttcaaatatctaaattccatctggggacttggctgtcaaaagataatcatctcttgcttcatttctcatataatttcctaaaccctcgggtctcagctagtgcaaggtcctgtcatggtcacctgtggcttgggccaattctcacttcccctgaagggcagctgcgtgtagggagcgggggctgcccaaagtttcactctgactggaggtaaacttaacatcatttctgcattagtcatttagagccctgggctcagtactttcccccaactgggtttctgcttttgagctcgctctgcaatttccccaattctgactcaattctctctgggcccagggagctgtcaacagccactcctccccacccatttctccagctgtagccctcttgcaggtgtcctgcccacaaaagaacaccagcatacaacgccatgcagggcccactctgagctggggaccttctgccagttgccacctgggatctctgccaggtgcccagaagaacctcacaccagacatccctacagctgagcgctgctcccacccagtgctctggactttggggaaagtaccaccgcccactagctcaccccagccacatgctgtccccagtgcctcctgtcttcccactccatccacgtggtcaagccttgtctcttcccaggacattcctgccacaccacaaaggaggctggcatcaaaagccagggggtgagcttgctgatgggagaagaggagaacaggaagacacagttgaagagtggtagagcctgcagcacctgccccaagaccactgccacatccaagtctggccgcatggcctctagtgccagggcctggctgggggactcctgacactgcacctgcccctaaacctctcagcagccttgacaaagctcagggggctacgcagggctctgtcatagagaataggaaaggagggcacacagcacaccaactcctgctagaaaatctccaggggctccccattcactgtgggtttctctttgcttccccttgaggtcataattttctttcttctgaatgcaattttatcttcagtgggcttcattacacaaacaagcaaaaagagtggggctgactgatcagggcaaagctcagtgagctcagagggcactggggcaggctccccctggaaaccctgctgcctcactgagggtgaagtacagaccccagggagtgtccttctggcctggccgcccccacatgccattggctcttcctgtctctgccgctcctcccagtcccccgccccgcagccatttccatccatgcacctctagagaaccctaggtctattcacttccatctggaaaacacttcttcagagtttccaccaacggagcctcagcctcagtgtcacttggatgaaaattttcgagacttccagaaggtgagttgttagttttcccccttggggctctgattaaatttaactctcagcacttcagcttacaaggaatcttcccttccgtgaacttatttggtcctaatgagaccatgggaaggagtgggctgccctcaaccagcagacatgctcagcactgtgtctgccatcccaggatgcagttggggcactgtccctctgtgcagaggctgggcaggcagacatcaacttaccgcaggtctgagactatctccaaagacagtgttctttccttgatgacgaccgactctttcctacacctgacccacactctgtgccaagcaaggatcatgcactcagggccctggctcctcctgcagggttgggtcttcaggagctcctgaggagtaagggccctgcctcggccaccctgttggccccagtgcctgacccaggccaagcgttcaggaaacctttggtggaaacgctcacatatccacttccttctctgcctgctcaaaagttgtacttggatttgactatacaccctgaagtatggagactggccctgactgccaggatacataggctgattaaaactcaagcaaggccgggcgtggtggctcacgcctgtaatcccagcacttcgggaggccaaggcaggcagatcacctgaggtcaggagtctaagaccaacctggccaacatggtgaaaccccgtctctactaaaaatacaaaaattagcccggtgtggtggcgggcgcctgtagtcccagctactcgggaggttgaggcaggggaattgcttgaaccctggaggcagaggttgcagtgagccgagattgcaccactgctctgcagcctgggtgagagtgacactctgtctcaaacaaaaaaacaaactcaggcaagatttaccaccatgaggatagagaacttaggagcacaatatgctgatggggacaaagagaacttcattgtgtctctcaaaacattttccaagaggaagacgggagagaatgagggcagagcacatggcacgtggcaggactgaacaatgacactgatataaaaacaactcgtgttcacaccaaggagcactggcccaggcacggagcgtgaccacaggggcggcgtgctgatcctggctcaggcagcgcatctgccacacggaagggcgcaccgtacccagtctggttgaggtgggcacccagcctcactcaacagggcattcaatgtaagtgcccacaaatgcaagagacagtgaacagaatggcagccagaccgcatgaaacgcagagctcttgaggcaccaccaggggaaggtggggcctccctggccacaaaacctgagacttcaagtcatgtctgagaggctgagaggattaaggaaggggctttggggaggggccagacattttctgacgagaaacgcaatgcagatggtgagtccaagatctctcggcctgacctgtctaattccctgaccctggactgtgcctgcgtggaaggctctgcccctccgtcccggcagcactgaccctgccctgtcccaaccaggcctgcatacccttccttcagctgaacacacatattttgtaccccgaacacccacagcgtgcagcaacatctgggaagccaagcaggaatctcactgacgtctctcacacacctcagctggcactctgcccccactgctggctctggagcaagcagaggccaacaagtcagaccactgatttcgtgctccagccttctggaggtaacacataactgcccaccatgctcttctttcccagaactgaagcccaaactctgggccaggcttcacagcaaactgaaccaccagccgagcaagcacctgagcatgtgagcccgtccttcgcattctgttaggcgcaaggatgcaggcagcgcacctcctcgccagccagtcgcccacggtcctgtcactgctgggtcacacgcagccctccaatacggagcacacataaataaagctctggcgcccgcagaccctgcagtatcctcctctgttgagtggtgagaacatctaccatggaggacgctacaaggattcaagaagccagcgcttgtgacagtgtgaaaagcaggtccggcccccaggcccaggccaccaaggaacatgcacttcccacagcccccacttcccctccaacttccactacttcaaacccatgaaagggggaactgcccacaaaagttcattctcccccaaaccacttactaagtgccaagtggccccaccaggcagagatggaggccagcgtgaatctgggctgtctcctgcccacctgccattcctctccaccagccagcaaggaggccccaggagcccccattcagctcacacacccagatccaaacactgcctccagcctggcccgaccacactaagctgccctctgcctctcccactttagggcttcgagacacctctttcaccagctgaactggtggaaaacttttcctgctgatcccctctagagaccgctctcattgcagaagtgtttctggaacacgaagtattgcaaagtcagtctattttgctacaaaccactctgagtagcgatttgcaaacaccatcccttatgcagtccgcacttaggaactctcttctccaactgagctacactctctggtccttctctaggtccaggtaaagatgtagccagtccttccagtctgcaaagcattatgaagctgcaaagaatatatccaacatcttattcagacttattcttgaaatgaacaatgtttcgttctttgctaacttgatgctcaaataccctctcaaaatctaaacacaagcccttcctgccaggctacacaaaccacacaaaaagaacaaccctatggtccaaagactgaggattccacagtccaactgaggatcactgtaaactgctttacatggtttaataacaaacataataatccatctatacaaacctgcaagagcacagaagacagatacccaagagtttcgctgagcattgtgtgtaatgacaaaaacagctacaaactacttagctgttcatcaagagagggcggattaaaatgagtcatggccattcctataaaggaacgctttctaaggggaatgctgtgggtttgagctgctgatgaggaaacatctccaagcaacatttcttaaaaaaaaaaaaaaaaaggagaaacaagatgcagaacactgtctataatatgatcccatctgtgtacttttaaccaaatatttgggtatacaatcttaaaaaaaaaagttgcacaagaaacttatcagagaggtatgcctctttctctgtagagggtctagggttgagaaggtattggggagggaaaggtttcattcctttttgtttcattcctttaaaaaaaaagggggggggggaggggcggggtgccgggtgtgatggctcacgcctgtaatcccagcactttgggaggccgaggcaagcggatcacctgaggtcaggagttcaagaccagcctgggcaacatggtgaaaccccctcctccactaaaaatacaaaaattagccgggcatggtggcacacgtctgtaatcccagctactcgggaggctgaggcaggagaatcgcttggacccgggaggcggaggttgcagtgagctaagatcacaccattgcactccagcctgggcgacatgagcgaaacttgatccccccaacaataacaaaaaaagtacgtgtatttattgtatttaaaaacttaaaaccaccaaatcaattatctatgagaaaaaggaacaagatcaacacatgaaatccccagatgatttaagaattccattccacttggtactcaccccttcatcccaaagattcaaccaaactgaattcagcttctccccattgctctctccctgcctgtccttaaaacaaaactaatgagctgttaaagggccacatgtgaggctgaaagggaaggaaacaaagcatgtgaataattcacaactggatcatcagccccgctgtgagctcaacagcccctgacacggatggagttgagtccctctggaggtggcatgctgaagggagactgccttcctgcgtggacctgggacagaggtggccacaggcaggctcagtaagtggttgctgaaccaactatatggacaggaaccaggactcaatggagaaacatgttatatatacacacatacacgcatatttgtcatacacacaacataacaaacgggcgcataacataagcgctgcacacacacacacacacacacacacacacacacacacacacagcctcccaaataaggaaacagcaggaacactcatgaattaagacagataatccccaacttagggatggtttaaaatttagggctcattttctcacggaaatgatggtataaatgttggcgaacttccctggctaggtaacacatgtctgtttagctcataaaataaatgaactcccagccaggcgcagtggctcacgcctgtaatcccagcactttgggaggccgaggagggtggatcacgaggtcaagagatcgagaccatcctggccaacacagtgaaaccctgtctccgctaaaaatacaaaaattagctgggcatggtggtgcgtgcctgtagtcccagctacccgggagactgaggcaggagaatcactttaaccctggagatggatgttgcagtgagccgagatcgcgctactgcactccagcctggcgacagagtgagactctgtctcaaaaataaataaataaataaataaataaataaataaataaataaataaaaataaatgaactcccattccgtccttgtgtttgattgccccagactgtctgctgaggagaccccatgtgccctcagggaggctgcctgtttagacctctggccgtcaccaacattgctgtgcttctgttctcagcagcttcaagggctgacctccacctggtgcccagccgagtaaacacgtggagcataagttccatgtgtatggactcagggctcctccagacaccacgggcgctgccctcacagagcactcacctgcaggctgcttcccctaagtgtcaggtcttcacctccgctgcggcctcaacgcagggaatttactattgaattcaccgccaagacaacactgagacagagtcgatgccacaattttacggcgtagtttatttttatgtctggcttagatctcaaaaagggtctgagaaggcttacataaataccattttaaaatacaaggaaaaaaacaacaccaaaagcaaaagtaatgagaaaaaaatacataaagtggactacattgaaacttaaaattcttgggctgcaaacaataccataaagtaaaacgacaacccgcagaaacgggaaaaaaatacttgcccattatctagctgataaggaacgtatttaaagtcttaccgctcaatatcaaaaacagaagccattaaaaatgggcaaaggagtgactgctagtgggtacagggtttctttgtgaggtgatgaaaatattcttgattgtggcaatacttgcataactctgtgaatatatgaaaaacttcagaattgtacactttaagtggatgaattatatgatacttaaattctatcttaataaacatgttattttttaaatgggcaaaggatttggatacacatttctccaaggaagataatgcaaacagccaataaacaaatgaaaagaagctcaacaacattagtcattagggaattacaagtaaaaatcactgtgaaataccacttcacacccactaatatgactataataaaaaagacagacaataacaagtattggcgaaaatgtggaacatttgacccctcatacattgctgttgggaacagaatggtgcagcagctttgaaaatcagtctagcagttcctcaaaaggctaaacagtcatcacataacctagcaattccacttgtagatatttatccaagagaaatgaaaacatatgcccacaaagacctgtacacaaatgttcacagcagcattattcacaatagccaaaaagtggagacaatccaaatgtccatcaactgctgaatggataaccaaatgtggtgtatccggttatttagcaatgaaaatgaagtactgattcatgctataacacaagagaagcccgtcctaagggaccacgttacatgattccatttatatgacatgtccagaaagagtaaatttagagacagagagtagattaatggttgctcagggcttgggtagggtgggccagaatcaggagtgactgctaaaggtacaagatttcttctaggaggaacaaaatattccaaaattggattgtgatgatggatgaaaaaccctgtgactctatcaaaaattaaatcatacaatatagatgggcgagatgatggcatgtgaacgacatctcaacaaagctgtttaaaaacataagacaaatccagcatgtattttttttaacaaattttatggattcctaatagttgtacatatttatgggctacacatgacattttgatacaagcatacaatgtgtaatgatcaaatcagagtaacagaaatatctaccacctcaaatatttatcacttcctgtgttgggaacattccaaattttctcttccagctattttgaaatatataattaatttttgttaactacagttgctctactgtgctaccgaacaccacatcttattccttctaactgtattttcatccccaacaattaactcctctccatccccgtctccccactaccctttccagcctctggtaaccactcttcttttcattaccttcatgagatcaaatattttagcttccacatatgattaagaacaggcaggctggcatggtggctcatgcctgtgatcccagcactttgggaggccgaggcgggcagatcacttgaggtcaggagttcaagaccagcctggccaacatggtgaaggcccgtctctactaaaaatacaaagttagccggtcgtggtggtgcatgcctacaatcccagctacttgggaagctttaggcaggagaatcacttgaaccctagaagcagaggttgcagtgaaccgagatcgtgccattgtactccagcctgggagacagagcgagactccatctccaagaaaaaaaaaaaaatacagaacaggcaatatttgtttttctgtgcctggcttatttcacttaatgttctccatattgatccacattactgcaactagcaggatttcattcttcttttttgtttttttatttttatttttttggagacgagtctcgctctgttgtccaggctggagtgcagtggcgtgatcttggctcactgcaagctccacctcccgggttcacaccattctcctgcttcagcctctcgagtagctgggaatacaggcacctgccaccacgcccggctaattttttgtgtttttagtagagacagggtttcaccgtgttagccaggatggtctcgatctcctgacctcatgatccgcccatctcagcctcccaaagtgctgggattacaggcatgagccaccgcacccagcctaggattttattctttattatggctttataatattccattgtgtatataaaaccacattttccttatccatgtgtccactgatgggcacttaggtggattccttatcttggctattaacagtgctgtaacaaacatgggagtacaaatatctcttcaatatgctcatgttcttccttggagaaatgtgtgtccaaatcctttgtccatttaaaatacctggcaatgagattgctagatcataaggtagttccatattcttagttttctgaagagcctccatactgctctccatagtactaacttacattcccaccactagtgtttgagaggtcccctttcgccatatcctcaccatttattttcagtctttttgataatagccattttaactgagatgaggtgatatctcatggttttgatttgcatttccctaatgattagcggtgttgagtattttttcatatacctgttggccatttacatggttttttttttttgagaaatgtctattcaaataatttgcccatttttaaatcagattatttggtttttggctactgagttgtttgagctctttatatattctggttattaatcccatgtcagatgaatagcctacaaatattttctctcattctgtgggttgtcttttcactttgttgattgttttctttgctgtgcagaaactttttagcttgatgtaatcgtatttgtcaatttttgctttggttgcctgtgcttttgaggctttactcaagaaatctttgcccaaaacaatgtcctgaagcatttccccaaagttttattttagcataatactttcatagttccaggtcttacatttaagtctttgattttgagttgatttttgtacatggcgagagacagaagtctactttcattcttcttcatatggatgtacagttttcccagcaccatttattgaagagacaatgtcctttgcccaatggatgttctcagcccctttgtcaaaaatcaactggctgtaaatgtgtggcccagcatgcttctgtgttaatctgtaaaacacattcttaaaagattttagctgaccaaaagcgacacaagaagaagaaaatatgatgaaattggaacaaaataaatgcacacaatggcatggtttttatggtttggggcagtagggctggtgggggaaggagatggccccacacttagctccaggctcctgagggccaaggcagaacggggaacgctgttagtcacaacatcatggtgtccatcggatgaaaaaaacttgcgagaaaagatagtgtttcttgaaaagaaaacagtctttctgatactggaatgtgctgaaaacttctttttgggtcttcccaaaaagaacacagctccaactggtgtggaagagtgggggtttcagggaggacctcaccagaggggaaactgaaactgacgaatgtaatctaacatttaactctggagagtgttgttgaaggcttccgcagagttggtggagagcagagttggtggagaccgtggaactcaagcaaacatctgaaataaactaagctaatgaaaccacgaggccattttgaactcaaggaaaataaaaaaagttgtccaataaaagcgcaattttagtgttctacactggctcaacagtcagcaaaacgtagtcaaaataatgatgatactaaatgtggatttaaccagatattttaaatacattttactttcgtgtaatcggtactgatataaacatatatactgagaggatagaggaagagagattaaataatgtctagcactgttaaatcaagagctagaaggtatgtgtattattttaaaatgtggaggcaaatagtagaagaaccagctaaataagagttgaaagtagttcttctgagaagcagaccacaacggtggggcatggggaagactgtgttaagctgtgacattattaaactttccatttatatacatatattactttatttaaaaatgaaataaacttgttaaatacaggaaaagtcacctatggtcaatgttccctgtgatcactatttctttaaaggggcacaggtgagaccacgctaggagaagaaaactctttcatcaggaggggcatcccactgagtcactgaagcccccagtgctgtgaggtccaagaacgtgctgctctcccctgggaggcctgtcttgatgtcaagatcccaccagccccagacaaagcagcacacaactgacccatggcaggagggaggcactcagaggcgcagccaggagggaagaagcctgctctccccatcctctttctggcccagtatgcatggctgaattcaccttaggataaacacaggtatgactacactccagtatgactagaaaaataacacaggcgtgactgcagttggaatcacagcttgcgggccacactggttacacatccaccgggactcaagagggatccactgagctgaacactgcctgctcgtgctctgtgcctaaggctccctgtctggcaagccccatggaagctcacagatctgtcatttgtggagagctgcagctcttgtgtttaaaaaggaatgatttggctgggtgcagtgactcacaccagcactctgggaggctgaggtaggcggatcccttgagcccaggagtttgagaccagcccgggccacacagcaagaccccaactctacaaaaaaaaatacaaaaattagcatggtggcacatgcctgtaataccagctattcaggaagctgaggtgggaggaccacctgagcctgagaggtcaaggttgcgatgagccgtgattgcaccactgcactccagtctgggtgacagaatgagaccctgtctcaattaaaaaaaataaaataaagaaaagaaaaagtgaaaaaacggaaggatttactaagcccagctgttcaatcagctcacagatactcactaagcactccacagctctggcctgtgctagaagacaaggactcagtcatgaggagggcacaggtggtgccatctcctgagttacaagacagtcgagggagatgtagacaggatctgacccatgaatgaagatataattcccaggtagctcactaagttgagaatagttgtacaaagagaacacttaagggaaaggcggaattatatgctctatggaccgtgaggtggtaggatgcaagaagttttggcaaaactgaaatgagcctaaatcaatacgccatgatgaactgaatctcccaacagaaaaagggacattaatggaaaaactggagagatccaaataaagcaattttaattaatagcaatataccaatgttggtttcctttttaggcaaatgcagcatggcaatgtaagttattaaattagtggaaactgggttatacagcaactctgtatttgctctgcaaatgtgctttgcaaattttctataaatctaaacttattccaaaattaaaagttgatttaaaaaatatacaaatatattgtgctcccccgccaagaaataagtgataccaccacgaccaccaccacccctgaattaaggctccagctttgaagcacagagcccaaagggaggggcgatggagcagaggccagcaggccgagagctcaggccatgcagagcctgggaggctaagccatgggatcaggtctgcatcctaaaaccaacaggaagcacctccacaaatgggagctacaggccttgtccccagtgcccctgaacatggagaaggacagccttcatttcactgatgagcgagtcagagcagagatgactcagcaacacagctctctcgacccacattctgccaaccgcccagactggcagaaggccatgcaatttgtaatccctctgacctggattttagcagccccaggtcagctgttaagacttgggagaagccgacagagctgtaggagggagtggtgggttgggtcttgattccactgttctcacctaatgccagctaacatccagatccaaccctgtcccacctctgaggctggggacgggggacaaaggggctccaggggttccacagataacaggaccccaacaggactgaggctaccttccccctggggctacatgcattcatgtagaaatgaataggaagagtggcaggcaaggtgggctccaaggctttctaaggttgatgccatacgcacaccaaggctgggagtgaaatttgggctaattaacagtgacatgtaagtacaggaatctttaatttaaacgtaagcctctgcataccaataaaccttgccaactttttgggagttacagaacctcatgtaaacttgagaaacaacaggaatacacctttacagagagctctggagcacggaactaagtatgcccatcatgcaaccctttacttgactaacaaaccagttgagttgggaatgatcgtctcctactagctaccaatagacatgttttgtttggcccatgatagctttgagataaagaaactttacacaaaatctagatattcaatttttcctgaaaaatccaaagactcattaaccatcagctagacctgagtggtgcctggttccctcttccccgccatatctttcacacagcaagatcttttccattttaccacacttcccatcactccctagtagatgtggctgggcaggctgtgccctgagcctgcaggcatgtgcatttactaccctgtgcacagagaatgtctcttcttccaacttctcttaaaagcacaccagcagtttcagtcacctgtttgattcccctccaagggctttctaaaaatttccaccaaaataccccgacagccacctaagaccgtgaccgcagattctgggaatgggaggcaggtgaatggagatgtggtcttaaatgacactcagtgggatgcaaaatttgtctgacatcccaagctttaccttagaagttcacgcccttgcattctatttcgtttacacatgttgtattctactccattatatatttgcattaaatttcacacataatgttttcaattatcaattaaaaggttgcctttaacccccaacccctaaacatgtcaagtaaaatgggggctccaggaagatctgccaggtttatgctgcctgtgtcttcccctcctcccagcagaccccaatgactaatttgagaagagcagtggctgaccgcctggtcctcagaggctccgccctctgcccctccggactcggggataccccgggggatccctggcttaccttcctgttttctcacattagagctgggatgcatatctgtcctcacttacagggacctgcattcgttccatgagaggcaaagctactccttacttagcattcagatgagtcccacactcccaaacatgctgtctgctctatgcaggccatccagcaagatgcatgggtgtgggtgaacacgcctgctactggggagtacaaagctctctttcatgcacactttctaagggactctaaccatctttacttttactagccttgtgcttgggtttaccacattcctcttggcccaggactacattcagaaatctgggaaatatagtccataatcaccagcactcttgctctgtagattataagtagacgaaagatgaaagaaaactggcaagcaactgggttctataacaggcattgcaggatcatgagatcccagcatttcccaaacccaacaaaatccaccctggggggatgttgttttatcatcatttatatctaggaagagcccagggtgaccacagtgagactggccatctggaggcacggggcctgagggcagacccacctatgaggcatggaagttgggagatttaaacacaggggaaaaacaggtaggggcgtgtctagcagtgaaaacaacactccaagaggcttgccaacagacaatgggcagtccaggcagctagagaccaggtactccaaatgcgcctaaattacctaaaggttcgacaggggagataggaccagttaatcataaaccactccaaaacactgaaagcatccaagggccatttacatagacagtcatggggcaaaaagatgaacaaggggtctaagcttcccaataatctgcccttctctcagggcaagtggccctcacgatcaggcatacagactcccttgaactaggcagactgatggcacatgcacgggcccatggcttaatttctcctaagacccccaaatccgtagccagtctggagtctggacaaaagctgaagaaccaagtgaacctgaaacactgcttctgcgactgagactgaaccagacctcaatctttcacagagaccttttccctttctccactgtcaaaaaaaggctctgctccacattcagccatctgctgcaggtggccggcaggagcaggacacactggcggacactctgcagtgcgaccagccgtgtaccttgggccctgggcagttaccctgggaacagaaacaagcggaggaagcacctgcaatgagcagaagctcatctaagctcatctacatcctttccccaaacagtacgttctaggcacacatccacttagacaaagaacacctccttctttccatacaagagagtatgcacacattctacaagagatccccctttacaaaaatctcacatattaaaatgccattgctcccctcctccatgagcggtgctctcaaatcttgcttggaaaaagactttttcccacccccatccccatcatggtcactgcagagactgcctacccggaccaggaaaaccaacagtccctggtcatccacttcatgagccaggcctctcctcagcatgatagcctgagtgccaccacaggccgggccaaggggactgcacagccgtgcacaggcgctactccccagaacaagggagggtcctggaaatgccagcgcctgggaaaaggaacagcatttccttcactgcatcagtccaaggactcctggcagaatccacttcctggaatagcaataaagccgccataaaagccgaaggtgcgacaccagcccaacagcagccactaggtgccgcagtctggcaggtgccaccctctggagagaaaatctgccaacacagattgtaaacaaacgtacctaagtgtacataaataagggcgaagatccaaaccttgtaacacaggcaacacttatttttgccctaagaaacaatgatagaatatttaactccatggtctcgtacactgctggagggaatataaatttggtttgaaaaaagctttctgaaagtttgcagtctggaaatatatatcagatgtctttaaatctgtcagtaagctccggtctaggcattctatttctagaaatccatcctttaaaaaagtccaaaatgtacaaagatgttcatttcagcattcttacaatatataaaaacgggaacaaattaaatactcaatgtcaggggcactcgcgagtccaccattagccctatcgcgaaggattatacagccgctaacaggctgatgggtaatttttaacggaatggaaatgctcgtgacagaaggatgcactattgagtatatgttaacgaccagtgtatgaaaattgcgcagaaaatggctggaaggaaaacatgacctattttcgtgtctgtatatttttctactttccaattattccacaattagaatgcattaggcttattttcataataaagcaattaaattttagagtcagaggctacactggcttgaaggaatcagggcaggcttcctggagaaggctgtatctaaaatgagaactaagagacacacaggacagcccgagaagagggaagggcatggtgacaggcgaaggggcacatgacagcatgaagacactgagtgctctggttgggttggcaaattatctccctgttatgcagagaaaacaacaaaccatgagccctaccatcccgcagacataacttccctcatcagccatagcattcttccagacttctctacagcaaggcactccaggctgtcgctaccaagaagacaagcaaggcttcatgtgaaataaacctatttgccatgcttgctgctgtttcatcactcctagagtcaatggaagttttcactgacatcaaagcaatgtcctggaatgttagggcgtggagcaccagaaccccacgtgcacaccgtacacctgtgctggcaaatacgtccagcagggctgaaacagcacaaaatgctttcccttcaaaatcgggttctgagtgctccccaaagcatgcctcgaaagtcaattctcccatcagacgcaaataattaaatgcacaaacacttggtgtttctttccctcaggaaatctgtcaataagctctggtctagtttttccatttctagaaatggaaaaggtcaccttgtttttcccccttcccttaggaaaaagggaaagaaactccaagtggggaagggttcaacacggtcagggctgaggtggaggaagagggcctctctttcatcttacacgcagtgggagggaaagcagaaaaaatctgaaggaggaaattatcaaatacaaaatacatgttgaaggctgggcggggtggctcacgcctgtaatcccagcactttgggaggcccaggagcgtggatcacttgagatcagcagtttgagaccagccgggccaacatggtgaatccccgtctctactaaaaatacaaaaattagccacacatggtggcgcatgcctatagttgcagctacttgggggtctgaggcatgagaatcgcttgaacctaggaggcagaggttgcagtgaccctgcagcctgggcaacaagagtgagactgtgtccaaaaaaaaaaaaaaaaaaaaaaaaaaggtgttgacaaggtgtggaggtggagggaaagccctgggagccaggttagccaggtcagggaccagtgaccctgtggaaaaggaagcagtgggcctacaagggttgaggtctgtgcctctgctagttattaacatgcactgcatgggcaaggcagtccactgagggactgggtaagatggacaaatataagcaccttttggatttagaaatagcaatgacagaaagaaggtaatttagctgattttaaaacctccgtacaaaatgcctctcctcccaagaagctcagactatcgcaaaatgctgttctcttcataggaatggggtgggaaatagtttcccatttctgtcttaaatcaaatggctgcctctatcagaaagcagatgacacatattaaggatgccagctaccccttattagacacccattatttttcagacctacacactcacacaggatggatctccatgcttacacatgcccagcaacacaagcatgattttcccagggtgacaaatgaagtctaggaaaacgctaagtgattgatgcctcaaaagaaagtgctggaaccaggtctgtgtggctccaaagttgcccttttcctaccatatgacaccgccttccaacaatggggggcactcaggtcctggagccccagcccctccgaaggcaggagtctggtcgccaggttgccggcacacggagttcacgcagagaggcagcaagtggagcctgttctcctaggaaacctcccatgggctgagtcactcagccatgctcaacccagaaaggtgacggagcactatggcaacacaacaggatttcctcctagactaaactcctgaacccgaagaaaaaattatacgtgctgctagctgcaaattgctgacaaatgctaaggcgctgtaggaaaagacatgcaaccgaaatctgtctgctgcaccattccaatcaaagtcaggtgggagctttttgtctgagtttcagtgttattgctacagcaaaaatgacaaatgcttgacaatataattatgactgtcaatcttcctaaaataaacttggaaacattcaaagagtaacagtataggcagacaagttaattatatctcataatctcatttccaatatatgtgttgccctagcaggaggcattgttggaaaggagctgcagttcctctgttatacaggctatttttatattttagattcatattttagttccaacacctaacaggattttattggggagaaattttcatttctacttttgcagtacttgggaggagtcaccagtaaaaacctctttaaggggactgcttcccagagtgaggaaaataaaaagactagcctggggagcaacgggctgttttcccatgttgcagacccaaaggtcactaggcttggctgtaaactccaattcatttaccataaaataaatattatttagatgatagatctaggcctaacatttctggttttcatttaaatatatcccttaacgaaaccaatgatacaaattaggggtcaaaagtaaatacttttctcaacccttccagaagcccccactccctgacctcaatccctgcaaccccaccccacccctaccacacaaacaccacgactgcttccttccatcacatcccagataaagagctccgtcctcaagacctggttcccctgatatctctgtgctcccttcccctgcactctacacacacacacacacacacacacacacacacacacacacacacacacactcaccctcttcctaggcctagcaacgaggcatcatttcctttcagattgcagccgcacagcagggctgctcccaagtctctcctgttcagctgcacaggcttgcactgcacaactcaggggacaacatttacaaagaccatgctgaggaaggcatgtcctggagggatccatcatggcaaccgtagctgctacctgccctgctcaagacttacgatattagacctctttacttaccatccttcatggttgccaaaatgcaaaagcttatccaaaattgtgattactggtaaagaagagagacagagaggtatgccagtaagagttttatctcttattgagagatagtccctaaaactttccaagtggctggtcaatcctaaaatgaaacaaggttacacatgtgtgatgcctgctgcctccttatctaatacagcacctggttcagggcaagggctgtggagttgccaaggtcaggagagggcaggtctatctcgttccatccaggatctcacagggcactgaagagcactgggaactaacttgagggtggctggaatttttcccataggccaatagggtaccattagtggatttcaagaagaaaagtaacagatcagacaaaggtttcaaaagctcacatgggcagaatggagaagaaacatcccaaggactgtacacgaggaaaatggcctggactgagtcaggaatagagaaaacggggcctgggagaggcacattctagaaactttgagtaaaaaattgcagaacttgggttgccgaggatgtagggatggtgaggtttctggagcactgtcctggatgggaggcagtgccatggactgacacagaaccaatgggcggagctttggggaaagggtgagctctgcttcagatacactgtctgaggcctctgggccaccctggaggaggtctctgttagacaactgggtcgataggggctggagctcagcagggaattcttggaccagaaatatagattttggagacattcacataaacaactgtcattgaagatttagatgtagatgagattccccaggatttttcgcagaatgaggagaggaggaagacctcacccaagcgcaggagacatcagcatctgaggctgagatgagggtctgggaatggagaaggaaagcttccaaggtggctgctttttgccgcatctcccgaaggagaaaatcaggtgaaaggtgctgtttacaaattaaaccactacaatgaatcatgcctctaggccacaagaaaaatccatcagaaacttaagttacatagagaaatatactttttaaaaaggaaccagtcttaaaataaatttccaatctgcctgtagaacttggagaagtagtggagggaaaaggagagatggaagcaaagcataggacagggaccaaagcctgaagggggaagcgacaggagagggagggtgctctgcatggacagcttgccctcccgaccaccccccagctcaatcgctggccccagggaagcagactgcatgacaatcgctcactttcagcactaccatttccgcacatgtgaaagctggaaagaacaactactgcctcttttcaccgcacagatgacctttgctaaatcccttaacttctcaacctcactttgtgaatctgtaaaatgagcggcaacatgtagcttccagggctaccatgagggacacagtgggggtaaccactaggacactgcccagcaccttttaggtgccagataagatccagctcttagtggtcatgccatttgggtccagggtattgttctaagcagcccttctccttttcctaagtatcaagagctcctcaggcatgggctcctcttcatttcgctagtgcatacctcattattattgaaaacggtagtagtcatcaattaccactgacacagcaggaggctctgctgggaacataattctttatgagaattttgaaacaataaactaaattttgctcacatagttcctgcttacaaaaacctttcggggactgcagtatcatagagactgcttatgctggactcccttcagtgagctctgctgatgaacacagcacaaagcaaataaatataaacgaatgaataaccccaatagccatcagcaaaactcacttgttttcttttccatgtgttctaagatgtttccccgtagatttcgcctctctaataacctgtatatgataatgagaacatgggtatgtgctggaagcccctctgctgcttacctatgaggggccccaagcactcaatgtatgaaacagaaagctgctgcactcacctagtgtccctaagggcagcctctgctctctcccagccacctgctgagcttcctctgagaccttctgagcccagcctgccacaaaggactgggtgagtgcaggctacctagcaaggcaggaggaggtgggagagacaggggttcagcccagcaggacaatgaccctgactcattccaccaggtctcaaggccacagtgagccttgccagttcctttctaagccatcctccagttcgcaaacctgttcatccacttctggattccatgagccaaaattctcatcttccaaatttccacattctatttataataaagacacattacttaggataacatgatggagtttctcagtctcttaataaccaaaatgcataacgtgaaccagcaacaggaactccctccacgacaggccatgatggaacctcaaagagaaaaatgctatgattatataaacttcacacattggggctttaagaacatactctgaagtctgtgaaaacaaataaacctaaaagctgttggaacccccccccaaaacacttcaagctttgagagaaatgtgactgtgatctgagtcacatatggttacaatttatgtttctcagattatagataactcattttcttctttttcttgctctgtacattgactaaagggaaaccatgtcagggtcaaaagcctcccgccctctgaattaatgacccttgttgtagattaactcccccttcattgccctgcttcgcttagaccaggtgaaagaaaacccaggactattacaccctctgttaagaaaatgttaaatatcccctccccaaaaagaaacatcacctagagccaatcaaattgctataacatacacaccaaccttgtatgaataatgttgtaatcctgctaaaaactccactgtctcagcccacataaatgaagccttcacttcctacttcggaaaactgactccatttcttcggagttggtgtttctgggtggcctacctcacactttgtacttatttaaatgctctttaaatcatattctgacccctttcattattttaggttggcaagtcaatctgctgaggtttgaatgctaggtccgactgcagaaaatcttgagaaagccccagtctcctgagccacagtccactcatctgcaaaatggacaggagggcagcacggagcctggggcaggggtgggaaggctgcacagatgaaacaccatgtgcttacttaaaacaatgctgccacacaacaagcacctgctaagtgctggttatcacattgccaccatcatctggagaaataaaataaggttggaaagttttaaaaaaatactcaaacataagatgtttcaaaaaaaaaaaaaggacttaaaaaaaccccatatgctagcaagaaggctcttatgtctgtttatatttcaatcgttggcttgacttccaatctgaaaattccgattcttcaggacccatctaacaccaaccccacccaaaatgagtgccccattagaaaatactggaatattgtggggatgggaaaaggaaggggccaagtaactctgcccagccacaacagaacaaaacacatacataagaaagacatgctggatgctgactgatttgcattttgtaaggagctgctgcaacctacacacaaccacaagggcaggaccgtccgcagagaatggcagaatggaaggtggagcaaatgagagggtgtgtagagcctctgaacaactcaggcccggggcctccaacaggaggactcctaaccatgccagataatgaacttcctccaagtctgcactacttgaattgggtttcctatcactgagggccaaagacgttctaatcaatatgcggtttagtaagtactctgtggggcattgcaagtacagacagacaagaaaacccttcaacagagggtggaatggcgttgcgtggggttgggaggaggggaaattaggtatttgtcaaaaagtacaaagtttcagttatgcaaatcagtgagtcctagagggctgctgtgccacagaggtcctgcagttaacactactctactgtgtacttagaaatctgctaaggggtagaccttatgacacacaataataataataataataaccagacagcaggaggaaacttttagaggcttatggcataaattgtggaggtggtttcataggtgcatgcttatctccaaactcatcaagctgtatacattaattatgttcagcttgttgtatgtcaaaaaaaattaaatacaaaagaatgaattttaagaaaaagaatatccttcatatttttaatatgttccttaaacttccatcagacaactaaatgaaaactcatacaaataatgtgtttctcacctgctaacctgttcaggtgtgcacacctgcaggggtgacagatgatgctttaatcggggagaggaccctgccaccccagagacaccctgctaatgccaattccaatcatctctgctcagcctccagagagcccaggcatccctgtccagaggctactgtgctgtgtcaggtgctgtaaagtctcttcacttcccagatccacccacccatccatccatgtccaaccccaggctccttgcagacaaagacccaaaagacagagtaaaaacttcagactacatacagcctcaaacacagcatggctacagggtgaacaccaaaccctggcatcattatcattagtaaagctgactgacaaagagctattttagtgttctgagccctcttcagcaataataacgcagagttgctaaaaaccaaagaagaaagcaaaggaaaggtcagtgttcaaggttagcgacaagatagcctcactgaaaagtttaataccatcctgcatttccttctgaagacctaattatattaattttatttgtgcccaaagctttgcaaacaacttgagctatatataagtcactaagtatccagtggatagtaacggttttttagtctgctccctcatcatcagagggagcctctgatggcttcaatgggagcctgagccatccatcaaaacaagaaccatacacacaactgaattcagataaacagggtggagtttaaaaaggtactgattctagtggtgacaatcatcactaaataaatccacttccactcttggcagcttctctgaatacatcactaggtcatgctgacactcagaaagggaccagagactcctaattaggatgcctacccttcccatcttatggaggaaggtgagcactgcccattagcaagcccctgagagcagccgctgaccgtgccattgggccgaccaacaggccaccacagtggaaggactctaatgcctggctcagctgaccagggcccagatgtcgtgattttgaagtccagctccttttctgccaggaagtgataaaagcatcaattgtatcaagtaacctgtgatctcaatttgtccaaggctctcattatgagagaaagccttctccctatctgcgatttaacttctcatgcaattcagaaagtcagagatgaatctcagcttccactggggtgactagctattaataaaaccaatacatatttttcctgagtcattccaccaagaactcaaagcataaaacagacctacaacctatgttaatgactccatcccaacccagggcacatgcagtggaaccggcaagttctcattcactccactgcccatgtcagccccacagaagaacctcagaacgtggcaatggagtataaaaacctttactggccaggcgcagtgtctcatgcctgtaatcccagcaccgcacgaggccgtggcaggcgatcacctgaggtcaggagttccagaccagcctggccaacatggtgaaaccccatctccactaaaaatacaaaaattagctggggatggtggcgcacgcctgtagtccccgctacttgggaggctgaggcgggagaatcacttgaacctgggaggcagaggttgtagtgagccaagatcatgccactgcactccggcctggggaaaagagtgaggctctgtctcaaacaacaaacgaaaacaaaaaaaacctttacaacagtgatttcactaaaatatccattttaagcaacattttttttcaaccttgtggcaagcaaagtaatgccacctcctgcccacaaagatgtcatcgtcctaatccacagaactgggaatgtcaccttaggtggcaaaaggggctttgcagacgtgattaagttaaggatcttacaatgaggagattatgctgggtaattcaggtgggcccaatgtaatctcaagggtctttacagtgacagagagagagaagcatgagagaaattagaagacacagaatcgctggctttgaaggggaggaagggaccaccagccaagaaacacaggcagtccctagatgctgggacaggccaggaaatgaatcctccctggagcctccagaagaaacatggtcctgctgacattcttgaattgagcccactgagagccatttaggacttctgacctccagagagggaagataataaatctggatcggtttaagccaccaagtttgtagtcacttgttatagcaacaacaggtaatgaacacagaggtcacagcaagttcttctctagtaggccagtagcctcactctcccttctctgcacctgtcccataccctcacctcactcccatgtcaacctctacttttttaccaaatgccttgttcattttccaatccatcaaccatcttctaattttacacactcaagaaatgaccctaacatagccatcataacaataattccccaaaatcctctcactcatgatgcactgccatcccgcgtcaatccccagtctggcagccacccttctacctccctgcttccatgctgcttagggggccagtcagggcagctggctgtatccaagactgcccgaaatgctcactctgcaccccgaccatggatgctctgagatgcacatgcacagcttcccaggaccctcaccacaaccgctgtgcgaccttcaccatgacctggaggcccaggtccttcccagcttatctctgtggcttacttcaacgcaaagttcctgacatcccacccaggtcaccaacctttccccactgaacttcaactctatgtgcaccttccctcttgatgacctccttcctcatctccttcctcacatccccactccccttccaaagcctaacctctacacccaagctcccaagcccatccccctcactgtgccaaacccttctggaacaaacaggtcctctaggagcttaaggtctaaagaatttacagaccaggccgggcacggtgactcatacctgtagtcccagctctctgggaggccaaggcgggcagatcacaaggttaggagttcaagaccagcctagccaatatggtgaaaccccgtctctactaaaaatacaaaaattaagtgggcgtgctggtgggcaccttatgtccagctactcaggaggccaaggcaggagagggggaggcggaggttgcagtgagccaagatcatgccactgcactccagcctgggtgacagagcaaaactctgtctggaaaaaaaaaaaaaaaaaaagaagaagaattcacagactgctcccctcttccaaaaaaaaaaaaaaacaaacaagcaattacagtatctgagctcagagcacgtgggagtagcttgcctagggagtagcttgcccaagtcggggacttaactcatacccaagtggacaatgagagtagccttccatgacaccacctgagggtcttcaagtatggtgggagttgaaacggcagtcaaaggaatgggaaaacaggaagtgaaagtatggtgccttcaggacccacagtagtcggttcagtctgctgtactggatgaagacttctgatcctcatctatgcatcagaagcaatgtgcatctgttaaaaaataaagatgactaggctccaggtgcaggtaattgttcgaaactccctacctcattctaatgtacagccaacgctgagaatggcaaggaggtctctgtagatactgaaagctttccaagggcgctcctccatactgctaaaggactcgaattccaaaccttcaacctccatgggtctgctttcctaaagctgactgcctgagacacaggccctggtccggatgctggtcaagtgacagtgctaattccccgtttacagtcacccttctctccctttacaaagaaaggcacacctccctcccatttctagtcttactgggatgtgctggtccagaactaaaaaactctctcaagtaccaatctaaggccactgaaaatactggtagtgacactgttaaagagaaattgttctgacacttgtcaaaaatggtaaggctttattcaagactattgcaataggggtcaatctatcacaacagcaagacagactgacctcaactccaaatacaaccaaaatcagtgtgaattcacagccaaggagcagagtgagggggtcaacggatacaaaattgctaagaggagaggcatgatgggtagaagtaaggaggaattcttgctgaagacagcctaaggtgatcagatattaagcgtgaggggatgacttggcaggactcttgctgaaactgagctccactgaggacagacacagagggcaaggtggaggcctagtgagaagagggctcagaggatcccaaccaaagtttggtcaaggggagagtttttgtcaacgcacgccttgcatctcaactggtttcaaattctttgctttcaattaaattgaaagatgacctaattgtagattactatgcggtctgggcacatcactcggaagttcaacatgaaactttttccatttccatcagttatacatgccctaacttgaaatatcctcgtccatctcactcagaaatttatttccagtaaattttactgtttatgtttaataatattcaattggtaatacatgtatagtgtcaatcaaatgtgcaataaaaatgataaatcaattagtctttttaaattttttggaggtatatctgaggaaatgttttaaaaattaatttcgatacagattttgttacaaaaaacgacagatcaaaactagactttcaagcataaatatatattattagaagaaaattctataaagtagaaattcaaaaaaggaatgctatatttgcaaccattagagaagattatttgcgttttttaaaaaaatcagtatcaaattgctaatggtatttagattccactgaatacattaaaagagtgatattatagttgaatttttaacaatgtttacaatacatgagaaatcaaatctattgtaaccatttaaaatctatgataaacaagatcacacaggttgagtatcctttacctgagatgcttgggaccagaagtgtttttggattttgcatctctttggattttggaacatttgcatatacacagtgaagtatcttggggatgggacccaagtctaaagatgaaattcatttatgttcatatatatcttacacatatagcctgaaggtaattttatacaatatttttaataattgtgtgcacaaaacaatgttttggctgtgatctgtcacacaaggtcaggtgtgaaattttccacctgtaacatcacactggcactcaaaaagtttcagattttgcaacacttaggatttttgattttcagattagggttgcttaacctgtatgttccacttaaaattatgtgagagggtatatagcttttgaaaattccctaaaagagtataagagccaaaattttgacaacctttgagctagagaaagctgctcaatttgggaggaaagaaatgagaaggaaagaaaggagaattcctgaagaaattctaaggaggaaaaacagtgtttggaatttatcttgagggcagcagagaagaacagaggttgcagagatttaatctaagggaaccccacgttgttttacacagctgcccttaggctataggaacctggcttcacagcttcactcaccgcaggcctggctgcttttctctccaactaaagggaaggagggggaactaggaactaggagcttcttcaataataatctcatcaacacactctttctctctgtctctgtctctctctctctctctctctctcgctcgcttgctctctctcactctcctcttctccccactccccataagggtttaggatctgtccccaccctctccataatgccatgttttggcccttgatgacactcagatcacaaaacaccaagagaatgaggccaactaaagagctaaagagtttcactcatctttcctctcagtattaaaagtcaagctgtcacctgagtagctgctcaaccatcctagcaaaagagatggctatggaccctttttttgtcttacctagggcagaaattaagagccaactatgatcacaatcacaatcttgctttcccttgctatggacgcttatgacaaagtttcttcttaatctagtcacagataataacaagcaagcccactttttaatcgacaggataaggaaaccctccctcctgtccgcaggtgtgcagccacctgggcacaggaaacttgcttgggaatgactgacaatataaatactctgttaatccaccctgggccacaagttccagaccaagtagggaatcttccaaagggcctccagcaacactgagggatttctctttacaggtgtatgtcagtgggagcttaggtttactcaaagactcccaggcaactccgaaggagttgagattctgtaatacatggtcatggcaccatccaaatgtgactcctaacgaccaccagatatgccctatgcttgaagcaagcaattgatcgatttcaaacctaatttaccggataatatctctttgttctggtctgaggacattgttctcttgttgacagttttgaagtatatagctgtacttcctgaaattttatatatatatgtattagtcactgcctccctgtcttcattgaccatttgattctttaaccctgacaagggaaggtcactgtttgccaattatcgaatccgatggccttctgcaaggcctcttctctactgttctacggtatctgaatgcagatcaccttcgcgtttagacaccctcctcccgcattctagactctcatttgttggatctcttttcaccaaggacagatcatcaaacacttcaaaaccagcatttaaaattaaactctgactttttaaaattaaggatatccttactctccaagtcaaaatctcagtcatccaactccacccagaatctctgtaattgactctgctctattcaacatgtttgttaatcagttggataaaaccaacaggagtataatcaaatcggtccatggtacaaaacaatatgggacactggattttaaaaaatagtgttcagacatatgttgataggcttaagtagatgagatgaatgattaatgtgaaattggaaacaatgtaaagtcctcaatttaggtttttaaaaaataataaacagctctacaactattgtgaggtgtggtggattagcagcagcacatgttaaaaagatttcggtctcactgcaaactcagggtgaatctcctggctgcaggggtggaggtgggaggacgcactagtataaactagtataattttatctgcttaatgacaagggccaaaggttttgatgctgccagtcagaccacacccacagaacagagcttcctattgttcaataagtgccagtggggaggacctggaggggaaccaaaggtttcagcacaaaccacaagaaacactggattcaccccagcccacttaacactggcagatccaaaaccaatctccgatcccaagatcacaggagagtgcaacccaaataccacacacagacagcaaacaggccctgcagacctcacaaaggtgcagcagctcatgaagccaatgaaagtgacaaaagatctagcagtcaagccatttaatatgaaccaaaaggtggccaaaggagaatgatatgaataaaaaggacaaagagaagctggaggtgggggtggtgggagtttccagaccagcgcaactaattctggggaaaaaactttcactatgatcatgccactgaagtccaacatcaagtgaagactgtcttatgtgcattatagaattttgtcaggaaaattacactgtccccccaaaatggactcatcattctaaaatgagtactcagagcctgaccaatatggtgaaaccccgtctctactaaagaaaaaaaaatacaaaaattagctgggctgtggtagcgtgtacctgtaatcccagctactcaggaggctgaggcaggagaatcacttgaacccaaaaggaagaggttgcagtgagccgagatcatgccactgcactccagcctaggcgacagagggagaccatatctctaaataaataaatagatttaaaataaaataaaatgagtactcaggatgaaattaacttttatgtttacaatttgatatttgtttttccaaaataaagtcccaaccgaactttttttccactttgactaggaaatgttgatccctgattcacatggattaatggctaagtggcctttttctaggaccaattattttcagatattgaggacatcctcatcaccatccagtccaaaattttcaaactgcagctatgaggatggtgagatgatttaaaaccatgttttgaaacaacagaaggtgaggcctggaaaagaacacacacacaaaatgggaccacacagctgtgttagaagactgagggcctgtcattgtgatatttctgaaaagcccatgagtgcagacctaggaccaggctgaaaatactgtcatttcccctcaatattacagaaaactttaacaactgaagttgccccaaaagttgatactttgtcttaaggcacagtgggtttccatcactagaggtgctctgctgccctccagcccctgatcaactgcctcttcttttcccactgcccatctactcagctcctgcccacagggctcttaccactgacggctttactcattcaagtctccatcgagtccctgctctgtgccaggcatggttccagcaactaaggatatgtcaatcaataaatcagagcaaaacctttgcccctaaattgcttacatggtagaaagtaaattctgtcatattttaaagatagttatgggaaaaggaggatattggtcagagttaaggtagactagggaaagaactgagaagaaattttaaatagggtggtcaagacagacctcactgagaaggtgaaatctgaaaagcttcatcaagaggacatgatagagtgagttctaggaaatgtccttgccctgcagagctaatcaagtgagcactagcctaatcctatccttgccatgtatttctaagtcatttaccctccgttagcctttatagctgtgcccaaagtaaaagaaagcaaaaaccaaggaaagccccaggtctgggcccaacgcccacaggcctcctcagacacctggacccaggctttccccacttcagagcagagctcttgccagccggttcatttattgctgccacttctcacccatgaccacctggcctcccgtggagtttccagagacagcaaactccctgcaggattctttttcattcaaattgcatgttgcctggtttctaaaaactcttaagagtgggtgggctgaaaggtttatttcaggaaattggcagccagggactgccacatttgttggaattccagggcacaaaagacatttggcaagagacaaaaaacactcttaaacataactcagttctaatttccagactcccaggcatcaaaatacacagaacttcagaaaaatactcagtgatcttattatttttccctagttcaaagataatgtccactttgcaaccctctctaagagacaactattccttttttttttttttttttgagacagtctcactctgttgctcaggctggagtgcagtggcacaatctccgctcactgcaagctccgcctcccgggttcacgccattctccaggctcagcctcccgagtagctgggactacaggcgcccgccaccacgcccagctaattttttgtatttttagtagagatgggctttcaccgtgttagccaggatggtctcgatctcctgagctcgtgatccacccgcctcgcccaaagtgccgggattacaggcatgagccaccgcacccagcctgacaactgttcctttttctagtccaagaagatctgttcttttgcccaacagcattgaagcacaaagcaacgtggcttaagcgtttccagctcttggttcctgggaaagatcagaaagataatgagtagtcccttaactaaaataagtctatctccttggaagcagaggcactggtattggtgagttttacactaaatagcatactatacatttctgggctcacttcagtaagaacagagcccttcaaacaaatactaagtagatttcaaaagtgtaaccaaccaaacctctagaaagagaatgcagtgacaatatctagaaaacaatgcacacaacaaaaagccccagggaggtgcatatgcttagggcctcattactctcgggattcaactgaagtgtagtcagttttaaaacctttttttttccttttagtttctaaggagttactgtgtgaaggccactgagaataacttcagcagggctactaggagacagcttagtactttcactcttcctgtaaggattgtttgcaggacctcacttcagccagctggcggaacaaaggcatagaaccttagcattttatgaaccaaaaaggcctctgaggttccctactcttagccacccttagaatctgccacattcgtggcctgggtccctggatcataaccagctggcacagagcaacaggggagagggagataaaatcagggccctcactggctgtgcatgtaattcacaggaaactctgagttaatagaaaagaaaggtcagtccagtaatgagcttccaagaagcctccctaggagagggatggtgctgtcagctgctgccggttcctccctgaagccctacctgggcttcaggaggggaacacaaccagggtttctcaggagagtcctggtgatgcccactgtccaggcacagctcttaacaacatcctatttcactcttcaaagtgccaccgtttgtaggctaaatcacatggtctttctaaggaagggtgactgagtttctaaggggaatacactttccagggccaccactgccctcgcgatgtagagcatgcaaattcctaacatgttcctgtgtgcgcagacggcagaggaagcagagcatcgaggtggggtacacactggaaccagactgcctgggttagcatcttaagccctcacacttaacagcagtgttaagtgttcacttcccatttgaaacaaaaatgaagataaaagtaattgctagcaggattaatgagataacgtgtaacatttatagaacagtgcctggcagttaccctggagcactctatgaatgtttagtaagcaaacataaatatgcagttctatgtctaacaggtaagtaaatttctacaaagggatggtgaggcaggggaggaaagcacttctcaaaacagtctttggattgcccttcctactcaaggacctctcactaacacagaaacccctgcgcatgtgagattctggatggtgctagatagggccagggtgctgggggtgggaacagagtcaccactgccacaaggccaccccttaatttcaggtggtttatgatcaaccacgtggcaaatttatacactgaaaccagctcaggcagaacaaaggaacaaagacaaatttcccaggttgcagccggcagtcagaagccagaagccaccaaatagctccctgggttgcttttatgcactcaacctgaagagagccatttgccatggcacatgctccacacctacgactgcacatccatgtatgtgattcaggacttcagaagcatcacaggtattcatcagagcaccccaccagagatgaaaaaatctcaaatataaatctcatacataaaatttcatgtgataaatgatgaagaaatctccttaactcctcagagagacgcctctccagcacaaagtggtggtacttaggataatcatcatgtcaaagtgggtgacatcacactgtcccctctgaaacaatcatctaatatttgactgtgaaagtatcatcttaggcatttaggtttcagttttacatcacacttctgcctttaaggtcgtttcaactttgcagacatgatctgaactcctattaagaggatacattcctatgcaacgaaacagctattttggaaagaatggagtcactgaggccgtctaggctacatatagggcacagaaccactcagacagaaggcttgggagacatgggtggcacaaactagaatgaaagaaacgctaaataatttcatcaagtgccgattaaaaaagattgcagggccgggcgcggtggctcaccttgtaatcctagcactttgggaggccgaggcgggcggatcacctgaggtcaggagttcgagaccagcctgaccaacatgacgaaaccccgactctactaaaaatgcaaaaattagccgggcatagtggtgggcgcctgtagtccccgctactggggaggctgaagcaggagaatagcttgaacccaggaggcggagattgcagtgagccaagatcgcgccacagcactcaagcctgggccacagaacgagactccatctcaaaactaaagaaataaataaataaaaataaaaaataaagattgcaagtataggtacacacattaaggtacaagcacatctgttttcatgcgattactggtctctgattcacttctttgttctctatggtgagtcactcagagaatgtgattcctaaggttctaaaattctgaataaatggaaagaatgcaagcagaggcactccacaaaaacattaaataccaagctacggggatatttccgaacagaaacaggaagtctcggctatggcagagcctggagcaaggagaaatttgtccaccagccttcctttcaggaaacacttttcctccaacattttgtaataattactttttaataaagggcgaagacaaactagtaatttccagcaccaatcactaactattaaggaagatagtttcacaacttcctaaaacagaggcatgggattcattacctatttcttttgacttcattaatttaacgcaaatttccttcagaataatgaaactaaggagaaagttgaacaagccctgattcagactggacaccccagaattcctctagttcgcattttaaggaacctgctttagtgagaagtatgtggccccatccgaggatgcaatttcacagccaggagcagccgcggtccccgccagggatgcggtcacgggcgctcgcacccggaagccgctcaacaagttccccgccggcttcggctccgcacccccacccagccaggctctccgcagaatttcctccccgcacctaaaggctgcacttcattttcacacgcgggaacgcctcctcccgctgctcacctccacaactcccggcactcccgcgacacttccccacagtcccctccgcccgctcccctcaccccggctcggcacccatcctttcctaaccccaaactgcccggcgccccgggctctccgcgcctgcgccgcgcccgaggaccacccccgcccaaccccgggtccatccgatcctcggccctctgcggcggggagagggggcggacggtgcacaaaggtcaccccgagctaacggaggcggtcggcgcgggaaacgcgctcacccgcagggtgggggcggggtgcgaaaaccgaaggaacgacggaaggcgcggaccggggcgggagcctccccgtcaccagggtcccgcacctcccagctccgggaggcgcgcagggctgtggctccccgtcgctccaccgtctgcgctcccaggcaaggtcctctggggcgcctcggaactgcgcgcccccagccgccagcatggtgggcgccgcgcctccggcagcacccggtccccggcccctacctccaagagcagcccgagcagcagcgccgccaccttcgcaggctggcgcctcatggctcctcgcgtcctctccagcgcgcccggacgccgggtcgcaggcgcgcttcgcgactcggcccccgcgcggggcgggcgggcagactgcagccgggagccgtcccgccgaccgctggggggcccggctgggagcgggcgggagccggggcgcgccgcgcagccctggctgcgctccgcccccggccgccgcgcgctcccgacacgcccggccgggcgcgcgcctgcgggctcccggaacccgaggcccggcctggggcgcggctgctgggcgctaggcccgcgacgctgaggtgcgcgcgccccgggcgggaggaggggctgcaccgcctggcgaatgggagggggactggcaggctctcccttcccaagggaggtcgtcctgtcgccctagactaaacccaggaaggcttttaaaagaagcagagtctccgcggggggaagcttgttccctgagaggtggccgcagacgaacccactgctcagtctggcatcccgaagccgctccgctcctggctctccccgctgttcctgcgcgcagcgggggcagtgcccccacacccacgcgtgatgggaaggccggcctgggggtgggaaggcccaccgaaatagatggtccccacacctcactgcttccttggatgtggctattttttatgccagtgttctcctgctctgaccctacttgaacttgaccgcaaccggccccgccttgcaggccaccctcccgcagcagaaaactgtgcggagctcgcgctgtcctcgcctccgctgaccccacctccatgtcctcacagacactattttttcacaacacagctcagatcccaccttcttcatgaggttattcaacaaacactattaaacttgtaagatgtaccagatcctgagttggaggctgagaggaggacaagaaaactgctcccgtagcctagagggagggagagtcgcttaaaccacctgatgcagaatgctgagtgcggagaccaggaggtgggtgcatcacagagggtcataaaggacatgagctgcgcagtacaggaggtggaaggagggggtcacacgaacagatgtcacccgaggcaagtccccaactctttcccagctttcaaagcctaatttgattaatatagagcatgcaccacctgactatacctgtcagagccagaacttacaagtaagacagaaacaatgcctatggccttcagtcatgctaaggcacctatctgacaagcctgccaaacgccattgaactctagtagttttactatttacaatgaggacattttacaactctttttaatggaaaagttaacttgtagaaaactaagctgaaagcttattgtgtgttagcaagacaaatgtttttccagtggggatagaagtgatctcgtcctgtaaaaatgcaaatgggccaggcagggtggctcatgcctatcatcccagcagtctgggaagctgaggtgtgagaattgcttgagcccaggagttcaccaaccccaacctgggcaacacagcaagaacctgtctccattaaaacgtgtgtgtgtgtgtgtgtgtgtgtgtgtataagacaaatgacccctgcttaaggtgagaatcataaccagcttcctatctgattgagccacttcattcccagcgtttcctttctcttttctccccgcttttgactgtgtgtgt

SEQ ID NO: 665 - DNA, 284985 bp, Homo sapiens
  source 1..284985: mol_type = genomic DNA
ctccctcttgcccttcttgtgataatgcaaggaggaagtgttcagctgttcattcatacacactcattgagtcttttctgtgctaggcaatgtctaggtgttgaagaaacactgtgaaagggataaaatctctgttttcaaggtactggggaaagaacaacatatgtataaacaaacaagataatctcagggagtattaggttccatgaataaaatacaacagggtaatggataatggaactttatttttattttcatttttgagagggagtctcactctgtctggagtgcagaggggtgatctcggctgactgcaacctccgcctcccgggttcaagtgattctcctgcctcagcttccccagtagctgggactacaggtgtgcactaccacgcccggctaatttttgtagttttagtagagatggggtttcactatgttggccaggctggtctcaaactcctgacttcagtgatccgcccgcctcagcctcctgaagtgctgggattacaggcatgagccactgtgcccagctcataatggaaccgtagataggcacaagtcctctctgagtggaatatttgaagccagagggagtcagctatacgaatatccagagctattctgtagctctggattggccacaagagggtattgagcactggaattctggctagtttgtactgagatgcgcagtaaatgtaaaatatacccgaatttcaaaaacttactataaaaaagttaacatattgtattagtaattttttcttttggcgacatgttgagatgatcatattttgaacatattggattaaatatattaaaatgaagttcattttcttctttttcgtttaaaaaaaatgtactagctagtaaatgtggattgcctatgtggctggcattgtgtttctattggtctgaggagaagggtcctaggtagagacaacggcaaaggtacagttcctggggcagaaactgaaggatgctgaggcagagtcggccggggaaaaagtggctgaaatgggaagggaccagatccagtgggaccttggtggcagctctgtaaggaggtgggttttaactgaagtacggtggggacgccgttttaagcagggaagggcagggtctgaattaacaggcccctgtggctgcgaagtggggaacggactgtgggtgagtgggccagacggacggccaatcgcacctttcgcttggatggaaggcagggtggttgtaggtgggaagaatcctgggttcccatgctgtctgaaccagagtcatttgtggccctgccctcccctgggactcaatttccccacctataaaataagccccagtgtccgcgaaccctggaggggcccgcaccactgcaggagcggccgccggcgccagggggcgcctcctcgataactcggcgctcggctggccaggcaccggcgcgtcggccgctcgattggtcgggtcggggccggcctgagcgccgcgggcctgcgccattgaggagcggcggggaggaaacgccgcgcagcgccgggctggggcgggcggcccgggacaccgacaggtaggggccgagcggctccgtgccgggcggggccagggtcgggaactgcagggccggcgcggacccgcgggccgccgctagggctccgcctggacatgggggcccgggcccaccctggggagagcgatgctaggagcctgggggccccgtcgtccggcctcggtctgagcccctcggggtaaccctgggcgtctgctccccccgggccccaagcccgccacctccggggacccctgcgtccgagtccccgcgagctccccaagcacaggctcggggctggctgaacctctgggaaccccgacgtccgtgtcctggggagcccgagcccccgctggaccccggcacactttccggggtcccagcagcctggcgccctggaattggggggtgtcagtccgcgcctgtccgcctgagccttggtctcaatgcaggaccccagtgtgcgagccccccacattacgccgaagagtggggtgtcagttctctagaatgccttagccacctcccttaatcagccacccgaggtcacactctcgcgtggagacatcaggcctaaaacctctctttaccttttgccccccagggtcacgccctggcccagccactcctcctaggtgtgggatgccagacatcaggcctaaaacctctctttaccttttaccccccagggtcacgccctggcccagccactcctcctaggtatgggatcccggcgccgttccctccaggttttacttgggtggtggggtctctgtcccctggagggggctgagggttccgagagctgggggcgggagggttgtgggagcgtcgccttccgggcagtgccgttcctgtggggccaccggtcgcacagccgtccccgccccggttttggagctccctggcgccggcagcgttcagccctggccgcctcggggagggacgcccaggtccggttgccagtccttcctattcccggtctggccgctcctcaggggaggggcctggctcaaggtcatgcccggctgtctgcccgcccgtgggctcagcactgatccctactgtcacccgccccactgggtaggggagcccaggtgggggttagtgccagtgccaggcagctgcctagaagtcctgatggaccggagtgtaaacactttgggactctggccagtctggcggcccttgctgacactgaattccttcagggaatccttgaagtggcctcaagcacggtctagatgcttagcagagcaaataatgggtgctttctggtttgggcctcaatgttactgaccaggttgcctcacaatgctaatcactcatgcttttaaaatctgtgctttgcattcttttccgtttagggcaagtagggtagggcctgaacttgtttacaaactgacagttgtttcccttgatttggagataattggtaattggcactcagagttggcatttagggccgaaattagtggcaataactacaaaaataaagagtactctgaccttggcttcttgctcaaatttgtttggagtccccatagtaagattagtcagtttcacatttggttttcacaaatttactcctttcaagttataatagtggccgggcacggtggctcacgcctgtaatcccagcactttgggaggccaaagtgggcagatcgcttaaggtcaggatttcagaccagcctggccaacatgatgaaaccctgtctctaccaaaaatacaaaacttagccggggatggtggcaggtgcctgtaatcccagctactcaggaggcagaggtaggagaatcgcttgaacccaggagatggcggttgcagtgagccgagatccgagatcccgtcactgcactccagcctgggcgagggagcaacactctgtctccagaaaaaaaagttacaatagagaaatgtttcttttattcagactgttgagcattttttttaaaaaattgttcttataacatcttctttaaacaaatgtagctaataattagttttatgtaactctacccttaaaaaatatctttatattccatttgcagaaaaaaaaatctttggaaagaaattggtcaaatattttaccaaatgctgtttttttctttttgctgtcactgttgaccaataaaagttaatcttctctggaagtacaagatattgttgacaaacaaaagccagtttttccaggagattgaattcattcttgtggaggccttgtgcttcaggtagttgttggatggcagcctctcagttgggataggtgtatcttctggcactaagatgaatcactagaggtggggcagcgtgcttggagaggatcctgaaagtaggctggctccagtgggatgcgtgccatggcaagtctgtagtgcctggcagggtggctgatgactgacatggtggatcagaacaagatttgaggctcacagtttccactgggatcttctagttgagcaatctcagaacccagttaaacttttgtgtctcagtttccctcatgttgactttttgtaatactaaaattagtctttttttttttttttttttttttttggtaatactggtaaacaccagttattataacaggcagtagtacctacaaaatctaaataccgtggctggagccagaggatttctggagtttggggtttgtaataatcgactaagattgttcattgtatcagcgtcatctggtgcccaggtaccagtaatgcagttccaggacatttaagaacagtgataaagcactgtcgcctctctcccatgtatattattttataagtgatcctcatgaacaaatttgagacatttaatttgggcggcctaaatgaggatcattaaagaatgtgaattctccccccacccccaactttattcaggtttgtttcatgagtttctttttctttttttttttgagatggagtctcactctgtcacccaggctggagtgcggtggtgtgatcttggctcactgcaacctctgcctcccgggttcaagggattctcctgcctcagcctcccgagtagctgggattacaggtgcctgccaccatgcctggctaagttttgtatttttggtagagacagggtttcaccatgttggccaggctgggtttggactcctgacctcaggtgatccacctgcctcggcctcccaaagtgctgggactccaggcgtgagccaccacccccggcctctttcatgaatttcattcagacaatctcttacggcattttctgtcttaatctaggataaggtttcttaacattggctctgttgacatttgggttggataattctttgctgtgggagctgtcttgtgtgttgtaggtttagcagcttccgtggtctttattcacaagatgccagtagcagcccctaagtcatgataaaaaatgcctccagagattactaaattatgcccataggagaacctctgatcacggcagtctaatcccaaggtaaatcaacataagcaagcaatggacagttacactgaaaagatagacagctttgaattgtaggtaatttttggtaaatttaagagtgactattccctgaagcagcatcagaatgtaggtgttttggtttggccctccagttactgatggggacatcttacagagcttcttgcctcatcttttaaaacatctgcagccgggcgcagtggctcatgcctgtaatcccagcactttgggtggctgaggcgggtggatcacctgaggtcaggagtttgggacaggctggtcaacatggtgaaaccccatctctactaaaaatacaaaaaatcagctgggtgtggtggtgggcagctgtcatcccagctacttgggaggctgaggcaggagaatcgcttgaacccgggaggcagagattgcagtgagccgagattgtgccactgcaccccagcctgggtgacgagagcgaaactgtctcaaaacaaaaacaaaaacacaaacaaacaaaacccaacaaaacatctgtgctttgcattcatctaccttcaggcaggtagaggaggaaattggcttagaaaatcatcctgtttttatgttgattttcattattttcctttcatagatttttctgtgaccatgaaagagagaaataaagaatgatccatgatttctaaacaccttttcctgaggatatagtcatgttggaaggccttgtagcctgggttctcaatacctatttgggaaaatatgtcaataacctgaacactgaccagctctcagttgcacttctcaaaggtgagtatttctctgggtgagatacagctttataggtggcgtttctatttttgtattttttttgttgtcctgagaatcataaaacctaatgcccagatggctttgtactaaatgtatgtaaaaaggtcccatatcatcctgatgatttttccagagtaacttaagtttatagctatattgttgtagattttaaggaactattaaatattaaaaaacaaaaacaaaataagctacactactggtgactgtgcttagtcccagttaacttttagctttatgaagctttatggaggcagccacaatgtaccgacagtggcattgactttggcttcaaatactgttttgtcacttattagctatgtgaacaatagctcatattgaaattccaagcctcagtttcttagacagagataatatacctccagagggttgctttaaggatcaactggaataacatttaaagcccctagcctgctggcatatagtaagcactcaataaaagttttaaaattgattattgtgaggtgttcaacagaatttctgaggttttgacttgcttagtagtagagtacctgaagcttcagacattttaccctttacaggcctagacttggtaaatgcagtccctgatttggcatgggaattcgaaaactgcattttctccctttccttgttttaatttaaattctctttgctcagctcaaaatggagctttttaacatacgtagggaagagaagaaagtcagtttgccacgtgtgtaaaatcataggaaatgggaaggagacttcaaatacagtgaaacctcacctttgtggatgtgagttttggtaagtggaccagagcaggttagagagaacagtgacacagctgtttgcgtagtctgagaatagagtaccggtggttcacatgttccattaaatgtgttgctttccggccaggcgcggtggctcatgcctgtaatcccagtactttgggaagctaaggcaggcggatcacgaggtcaggagtttgagaccagcctggccaacatggtgaaacctgtctctactaaaaatacaaaaattagctgggtgtggtggcgggtgcctgtaatcccactactcgggaggctgaggcaggagaatcgcttgaaaccagaaggcggaggttgcagtgagccgaggtcacaccactgcactccagcctgggcaacaagagtgaaactccatcgcaaaaaataaaaaataaaaaaaaagtgttgcttttcatgtttttctgaccaaatgattgtggcagcgctaggccatgggcagagccgtcatggtcacgcctccccactctcttcctttcctttcctattctcctggttttcctcttgtcctgaaacgggagctaagtggaaagtgcgagtgagcagtctgtcagggaagaggatgcattcaaagtgcaatagtagtgtcaagttcacctctctggtctcttattgaagttctcagacccactgtgaagctaactacgttgtatgacgtatagataacagggcctagaaagagagctgcagaccacgaccctgctaatcaaagagctggttctgtcaggaatcatgtggcaagagcatttgccaaagaaatgagtaaatagaaatggatatctgatgtgttacagagtcgtactaacatttctcagcagttttagaatgtatcttgtaacaactgtgtttatctggtactttaaactgcttttctgcccttatttcctttctaaaaacattattctttatggcttttaatgaacctgtggaacttgaagaatgcttctccgcagggtagaacaatgctttttcttttgtaactggtgttagtatggtacccaatgcttatggatccaaagcacatcacagagcgtggccagaacaatcttgggggcatggaattgtactgagggaatggcttcgtaaagaagttggtgctgcttgttcgtctctgacacagttaagcagtgtttgggaatagagagggtactagataggaatgagaatgttctttctttttttttgagacagggtttctttctgtcacccaggctggagtgcagtggcgtgatttcacctcaatgccaccttgaccttctgtgctcaagcagtcctcctgcctcagcctcccaagcagctgggaccacaggcatgcaccaccacgcccggctaatttttatatttttttggtagagatggggttttgccatgttgctcaggcagctcttgaactcctgagttcaagtgatcctcccacctgggcctcccaaagtgctgggattacaggcatgttccactgcacccggccgagaatgtcatttcaatccatctactgatatttactgttctagatgctttgggagatgcaaagaggactgaaatagtggtcaagggtattgatttttttagctaaactatgtgtttgaatcccagttcttccatttaccagtaacctgggtaggttatcagtttcttcatgcttcactctccctttttgtaaattggagataatattaactatctcgtaaggttctgaggactaagaaattaatgtgggtcagagagcttagagctgttcttggcatattgtaggctctcagtcaatgttagttatcatccatcctcatgatcatcagtgtatgattggattggctgatggagtggacttcaaagagattgtgtgtgtgtgtatatatatatctgtgtatgtatatatatatgtgtgtatgtgtgtatatatatatatctgtgtgtgtatatatatgtgtgtgtgtatatatatgtagattgcatccacatatgaaaagtaacaaaatgcaaagtaacatgagtgtttaagaatggagatagcatttaaagacaaataaaaaaaatacaaagtaacatgggaggatcacctgaagccaggagttcaagactagcctgggcaatatggtgagatcccttttctacaaaaaaaaaaaaaaaaattagctgggtatggtggcgcatgcctgtggtcccagctacttgggaggctgaggtgggaggatcacttgagctggagaggttgaggttgcattgagttgtgttccctccactgcactctggcctgggcaacagagcaagatgcttttcccccaaaaattttcacttgttcagtcattcaaaaacatttattgaggtcgggtgtggtgcctcacgcctgtaatcctagcacttcgggaggccaaggccagaggatcacctgaggccagaagttcaagactagcctgggcaacatggtgagatcccttctctaaaaaaaaaaataaataaataaaattagctgggtgttgtggtgcacgcctgtggttccagctacttgggaggcccaggtgggaggatcgcttgagcccaggaggtcgaggctgcattgagctatgttcttgtcactgcactgtagcctgggcaacagagcaagaccctgtttcaaaaacaaaaaaagttcattgttcagtcatttaaaaacatttattgaggctgggcatggtggcttacgcctgtaattccagcactttgggaggccaaggcgggcatatcacttgaagccaggagttcgagaccagcctgggcaacatgatgaaaccccgtctgtactaaaaatataaaagttagcgggggtggtggcgtgtgcctgtagtcccagctgcttgggaggctgaggcatgagcatcacttgcagtgtgctgtggaggctgcagtgagctgcgatgtcaccactgtactccaacctgggtgacagtgggaccctgtctcaaaaaaaaaaaaaagaaatatatgtatatatatctcccccccaaaatatatatatataaaataatccccaaaaaatcccccccaaaaaatatatatatatacttgtaatcccccaaaatacatacatatatatgtatacatacaggcatggtggcacatgcctgtagtcctggctactgaggaggctgaggcaggaagatcccttggtcccaagagtttgaggctgcagtgagctgtgattgtgccactgcactgcagccttggcaacagagtgagaccctatctctaaaaaatagtaataataataaaattacaaaaaaattttaaagcaaattgcttgttctctaagcctttttttttcctccacctcaaaaattgagaaactaatattatttatttgtattgttgtgaggattaaatgagataatgtgtatgaagtgcttggacacagtaggaccacactaaatggtagctgctattctttttttttttttttttgagaggaagtctcactctgtcacccaggctagagtgcagtagtaggatcatagctccctgcagcctcgaacttttggcgatcctgaagcgatcctcctgcctcagcctccagggtagctgggactacaggtgcatgctaccatacctgggtgattttttattttttgtagatacagggtttcactatgttgcctaggctggtctgaaactctgggctcaaatgatgctcctgcttggcctcctaaagtgctgggattatgggcatgagccaccatgcccgtcttgttattccacctctatagtccctgatctcagaggactgttaacctgtttgggagacaaattatacggtaatacaaggcagtatagattaaatgattattctggaaatacaggcatcatgcgatggggtgtgaaggaagagagctgtccattttgcctgtaggactctgggaaggttatggaggtagcttttgagtggatctttttttcttttttctttttttggagacagggtcttgctctattgccccaggagtgcaatggcaccatcaaggttcactgcaccctcaacctctctgggctcaagtaatctttccatctcagcctcctgagtagctgggactccaggcatgtaccaccataggtccggctatttgttttattttttgtagagatggggttttaccatgttgccaaggctggtcttgaattcttgggctcaagcaatcctcctgccttggcctcccaaagttctgggattataggcgtgagccactgcgcccagccttaagtggattttagcaggatttccataggtggcactgggcaggtccccacattcgaggtggaatgcaccctgtgagcagaggctgaaaacttgcagggtgtttttgaaatggtttggggccagaaggtagaggctgccagtgccatgtcaaggaatctgaacttcagcctgggggcctatcgtatatttgtaacccaaaacatccatttcccctcctttttgtttttataagctccgaaccttaggttgactctttaaataacctggagcagcgggaagagagttcagtagccattagaaattactgagaaatgacctacctctaaattactcccagtttagtgagtagatttcttgctagcctgagatgaggagtttttggatgagacatccgtgagtaagtctgtaatgtctgcctggagtgagtgacccgcattatcatttataaagcactcagtacattggggtctgtctggagtgagtgacctgcattatcatttataaagcactcagtactttgggtgtttttctgcttggctctttggagggacctttccctgcagggccagtgggtgcatatttgagtgggtggggactaggaaaccttcagtcttaaactacggccatgctgttttgccagattcatttgcttttggcttggtgtaggctgttgtttcttctcattttttcctttacattctctctctcctttctagatctcctcctttgccctcttatgcttcagctttaatttttcgtggtgcgagttgcctgcaattccctttactttcccaaggttgtacagctgccagggaagcccagagctcacctgcctttgtgacagatttgggtattgaaaaataaggtggttcgggctgggtgcggtggctcacgcctgtaattctagcactttgggaggccaaggtgggtggatcacttgaggtcaggagttcaagaccagcctgatcaatatggtgaaaccctgtctctactaaaaatacaaaaattagctgggtgtggtggcgggcacctatagtcccagctactcgggaggctgagactggagaatcgcttgaacccaggaggcggagtttgcagtgagccgagatcgcgccattgccctccagcctgggcgacaaaagcgagattccatctcaaaaaaaaaaaaaaaaaaaaaaaggcagttcgaagcataaatcatgctcttcaaaagaagaaactatttaattgcccccattaagtctgtttcaaccaaggaaaatgtttcatgatttttttttccccttatgttcattttctccccaaatgtggaaatggggttgtttcgctggggttacaaactttttctttctgttagtcgtaaggtatggtggtggggcggggtggggggtggggcatggcccatgtggacaaatgttcctgcaaaaatcaacaaataaattgattgtatttgttcagatccgccaagttgctagatttgaattctttttcttctttttttttccctttttctttttagagatggggtctagctttgtcaccaaggctgggagtgcagttgtgtgagtatagctcactgcagccttgacctcctgggctcaagcgatcctcctgcctcagcctccccagtagctgggactacagatgtgtgctaccatgcctggctaatttttaaaaatttattgtagagttggggtcttgccgtattgcccaggctggtcttgaactcctgggctcaagcgatttcccagcctcagcctcccaaagtgctgggattacaggggtgagctgccgcacctggcctgaattcttctttagaagccagtaacccacaagtcctgaacaatcatttaaagggaaacataatcatgttttttgcattattttgtacttggagtaaaaggctctcttgcatttcttactaattaatggttgttgtctgtactccgtgttcttgaaaatgtatatctcagacagatttaggttgctcaaaaattgccttgtgtctcgcaaacaattttgtaaaaacaatggcagtgatttaaggatggggactctgccttctctttttacattttcagtggccatcacagtgcctcccacagagcagggctctatatatgtgagggtgaatggcttgcatagccgggagagtgatggatctagctgccctcttgtcagttcactttcgggtttaagtcataaaagttgggtctgaaaacaattttcagcggcggtcctgttccttcttttgctttctgatcggttattacacttgtaagtagaggtgctaaggagttccccagaagagaagagtataattccttttgaagaccagtttcatttaattggatcatagacttttgaatactgtttgcactatactcattttggggaggggttgggggtggaaggaacttgttagaaactgcaaatttctgtgcttcaatcccagagattcagaggtagttggtctgcgggtggggcccaggagcctgcatttcatcctaggtgagtcagattttgatgttcctctggtaaatattagcctaagcaaggggtcagcaaagagacccgccggccacatctggcctgcagactaagaatggtttttgcatttttaaaggttgataaaaaaaaaaaggagaatacgcaacagacatcatataaatcctaaaatatttactatctgtcctgttatggaaaatgtaactcttggtctgaactcttcatcagcgcctaagcttcagctctcatgtacgtgttagagcggacggcctggaaattcgtttagatgaagcgtatgggctggtggtagcactacacatgataagcctgttctagatgtaaaactttccctttaacctacacatgatatagcctgttctaggtgtaaaactttaacctacacatgatgtagcccgttctagatgtaaaactttcctttaaccttcacatgacgtagcctattctatatgtaaaactttccctttaaccttcaatgctttacacacagtaggtggcctactgtatttgttaaatggatatttcatgatgctgtttttatttttaggtgctgttgaattagaaaacttgccattaaagaaagatgccttgaaagaattggaattaccatttgaagtcaaagctggtatgtggaactaaaggagggggaagaaatttgagtcttaaattgtttgagaggtgaaaactgagagccctggagtttgtattgatttggccagttagaggaaggatatagcaaatgttagagtttaggccagtcttaaagtgtggtctttgggccactcgtatcaggatgaccttgtgatggtggtggggaggtcaggtgatacccggaccgactgaatcagaatctctgagggaatgtcattgaacctacagtgtttaataagcactccaggtgattcttatgtttactcaagtgtgagaacctctgttctacattcaaggtttccttttctttcccctttccctttttctttttcttttcttttcttttttttttttcagatggagtctcgctctgtcaccgaggctggagtgccgtggtgcgatctcggctcactgcaacctctgcctctcgggttgaagcaattcttctgcctcagcctctagagtagctgggactacaggtgtgcaccaccatgcccggctaatttttttgtatttttagtagagacgaggtttcgccttgttggccaggctggtcttgaactcctgacctcaggtgatctgcctgtctcggcctcccaaagtgctgggattacgggcgtgagccaccatgcctggcctcctttttatttatgtatttatttatttatgacagggtcttgctttgtcacccaggctggagtacagggatgctatcatagctcactacagctttgaacttccaggctaaagagatcctcctgcctcagcttccccagctattagttggaatagttgaatacagctgcgtgccaccaagcttggctaaatttctgaatttattactggattacacggttgatcatttgatgttgtcattaaaaataccattgttggactggacttggtggctttcacctggaatcccagcactttgggaggctgaggcaggaggatcacttgaggccaggagttcaagaccagcctgggcaacactgcttgactcttataaattgaacataaagaaagcttgtattctaggaggcttggctagaaatggaagaacttgggaaataaatatcacaattctaccgagccgtttggctttctcatcagcccaggttctcatgaagcatcagaattctttattgagagaaggccagcaccatttacctatgtttcagtttgtggtgggtatgttcaagattgaatatatcataggtctgatgactccaactagtgcttatcaaccagacaatgactaatgaacaagaaatgagtttagtgtccatgggcttgtgcgggacccggggaagaaagacaccctgagcaagtgtaagatgtactccagttggaaaaggagatagtttctagaggagggatgttactgttgatgtggtaaagtcttcgcgaactttttccagcttatataagtcattataccttattcttacagatgtcagcctcctaacacttgtttcacatgtgcaagagcctgctgcctgttgttttaaataaaaaaaagtagtaacagcaatccatgctccttaaacaaaattgtaaaaataccaaaaaatggaaagaattaaaaatgtgtacagatggtgaacaagactttccttctccttccaggcttcattgggaaagtaacccttcagattcccttttatcgcccccatgtggacccttgggtgatctccatctccagccttcacttaattggagccccagagaaaatacaggatttcaatgatgaaaaggagaagctgttggaaagggaacgtaagaaagcactacttcaagccctggaggagaaatggaaggcaaggcagagatcttctgggccataagagcagttgtggtgacacgtgtaagatgagcaagaacactagattgagctaatgctgactcttgtctttgtagaatgaccgccagcagaaaggggagtcctattggtattcagttaccgcctccgtagttacaaggattgtggagaatattgaagtaagtcctgctgacttttataaaagtatcaacgtgaaagggatttctcaggtttaaacgtgtttctcctcttagtttctcatttctcgtgggctcagctgatctagggtgtagatggggctggctgctcaggtctgcccttttgtaggctgtgccaagaggaaaacctgacaagcaagtcctaggctctgtggcagacacagagttttcttgtttctgctggcatgaggaggagttttcacatctcttccatttcacttcccgcactttctttttgaatgttggaatcccacttgctcaaggatttatggcctaagaatccaggttacttgaccttgatgactgtatggtttcagggtaaatcacttcacctctctggtctcagtttcttcatctgtaaaagagagaggttggatgcctggtctctagttggttacatagtgagttgtgaaattgcgaacagctcactaagatacctaacctcttgctggtgtatctggtggcaatttgacgagttacaggactggggctgttgaccttgcccatgttttctacttcaattatacttttgtttcatcctcaaaaacttgatcagggtcccactaattttcgtgaatgttttaagagtttgtccatacttactacctctagaagtttcttgcagtgccaatgtgacagaggccaaatgtgttcaatgtatgtcatgttcccaaaaattacagtctgaggtttttgatttcgtaactttcctttgacaaacaaatttataaaatattagtcattattttcattttatcttagtttaagtagttttattgagatatagttcttatgccagaaagttcagtcttttaaagtgtacaatttaatgttttttagtatatttacaaggttgtgcgttggtcaccactaaataattccagaacatttttatcatcccaacaggtagtcactgccaaagctgggcttcgtggcatgtacctgtaatcccagctacttgggaggctggggcaagaggatgacttgagccgaggagttgggctgcaaggctgtagtgagctataatagtgcccctgcaccccattctgggcaacagaccaaaaccctgtatcttaaaaaaaaaataataatttaaaaaagtagtcattgccaattcccctctgccttcagcccctgtcaatcactaatctactttctttctagatttgcctattgtagacatttcatctaaatggaatcatgtaatatatagcctggccattttcacttgacataatgttttcaagggtcatctgtgtagtagcatgtgtcagcactttattcctttttatgactgaatcatatattccattgtatggattgtcaaagattaaacaaagctggacctcagagcaatgaaaacagattttactctgtaactactgacagtagaggaaagagctgagctccaggctgacttgtgtggaggtagctgggccttttaaagagagcttgagggtgcagggaggtggagtgagtgggtactcaagtgaaaaattacaaggcgttggtcgctgtgaatgtcattaggctaactgtgtccgctggcagtgatcaaagttaggattctatcctccctcagactgggagattgagccttacccttcctgatgattacatttcaaaggagtggctttcaggtccttaagaaagacactcctgagctgtaggagatacaggtcgagtatcccaaatctgaaaatctgaaatcctccaaagtttgaaactttttgagtgcccacatgatactcaaaggaaatgctcattggagcattttggagtttggatttttggatttgggatactcagccagttaagtataatgcaaatatttcaaaatcccccccaaaaatgaaatccggaacacttcttgtcccaagcctttcagataagggatacgtgacctgtacatatacatctctcagagaaatgtcacagttgaattgctctgcaaacctataaacccttttcagtaaacgtgctataagaaaggaaggtcaggggcctgtgtcaggtgttgtctggaataaagggtacgttcttttgatagtcctgagctttaccaggcaagaactcagtagaggactgtgttgtccccagggacatggcctcgggctgccagaagccatattaaagtttggtcaagtctctttggaatggaatgttcttgctgagagtccttgcgtttctcaggacatacgacattttgtttattcattcatgagttgctggacatttgggttggttctcctttttgctattacgaataatattgctgtaaacatttgtgtatagggttttgggtgaacatgttttcagttgtctcaaatagatatcttggagtagaattgaggaattatggggtaactctgtttactttttgaggaactaccaaactgttttccaaagaggctgcactattttacgatatcaccagcaatgtatgagcattttgtttctccatatcctcatcaacatttattattgattatggggctgggcacgcctgtaatcccagcactttgggaggccaaggcaggcggattgcttgaggtcaggagatcgagaccagcctggtgaaaccccgtctctgctaaaaatacaaaattagctagacatggtggcatgtgcgtgtcgtcccagctacttggtggggaggctgaggcaggaaagtcgcttgaacccgggagacggaggttgcagtgagccaagatcacaccattgcactccagcctgggcgacaaagcgagactccatctcaaaaaaaaaaaaagcctgcagaaatggtgagatagcattctctctaacaccattcaggacagaaagaaaaaaattaaaaaaaacccaaaaaaaacccaaaaaaaacaaaaacaaaaagcaaacatttattattcattgtgtactagtgggtgtgaaatgatgatcttgctatgatttcgatttgcattttcttaatggcgaaggatactgaatatttttccgtgtatttactggccacttgtgtatcttttttttggagaaatgtctatttgaatcctttgccacaattttttttttttttttttgagacggagtctccctctgttgctcaggctggaatgtggtggcgtgatctcggctcactgcaacctccgcctcccggattcaagcgattctcctggctcagcctcacgagtagctgggattacaggcctgcgctatcatgcctggctaagttttgtatttttgtattttttttttttttttgagacagtgttgctctgttgcccaggctggagtgcagtgcagtggcgtgatcccggctcactgcaaactccgcctcccgggttcatgccattctcctgcctcagcctcccaagtagctgagactacaggtgcctgccaccacgccccgctaattttttgtgtttttaatagagacggggtttcaccatgttggccagtctggtctctaactcctgacctcaggtgatccgactgcctcggcctcccaaagtgctgggattacaggcatgatccaccgtgcctggccatcctttgcctattttacaaatcagtttatctttttattgttgagttataagagctctctatatattctgaataccagattcttatcagatttgcaagtactttctcccattctgtggattgtctttttactttctgttattattattattattattattattgttattattaagacataatctcactccgttgcctaggctggagtgcagtggcaccatcataccttactgcagcctccatctcatgggctcaaacaatcctcctgcctcagcctcctgagtagctgagactgcaggctcgtgccaccatacctggctatttaaaaaaaatttttagtagaagtgaggtcttgctatgttgcctaggctggtctctaactcttgggttcaagtaatattcctgcctcagcttcccagagtgctgggattataggcatgaatcactgtgctcaacctgttattattttttaattcattgaagcagagtgcctttcctgtagcccacttacagggaggggctaggggaaatacatatatacatacatagtttatgtgccttgctggtttccttggtccagatgtggggacatagaggcaagatgaagatatcaacagagcaagaggaacaattgtctgtatacaatggctttgctttctttaattgcttttttttaaggtgtcttctgaaatgatttaatgaaagtattggagctcttttggtaaaactaatcacaaagtaacattcaagagagttatgataacataatataacataacataatataacatattataacataacataacaagagagttattataactcccttaggaacttataggacactggatatgtgtgtgttgtgtttgtataaagtgcctggtgtggtttcctttagtggctcaagggcagtttgacccctaactatagtatttcacctacagcagttatctaaatgctttttcttttttcttttctttggaacactattctgcaggtgcatcagctgctttttcttttttctctttgcagttaaaaattcaagatgtccatttacgctttgaagatggtgtcaccaatccctcccatccttttgcttttggcatctgcattaagaatgtgtccatgcaaaatgctgtgaatgagcctgtgagtatgaaatgtgatgacaaagcaggaagaaagccatgctctaggaatctggggctctgccttttgccattttgtgttatgtaaatgaatcacattcttttccattgccttctgtgataggcatgggtgtctcttgtgtatttgcaacaaatcaaatttgctgaaatagggaaacaggtaattttctctgacctttggttatatcactttcattttatacatgaagaaactgaggggcagaaaggattttatttttgatttttttctcgtgttatgtacactccctgggtaaactcactgtgtttcatagttgtagctaccacctgggaatatttgatgatggcttccacatcttgaactccattctccaccctttgaccttcatattcgtggttttcttaaaactactgcttgtctcaaaacacactctgtttcttcacactctacacaaaaaacaacacttttgacaccagacgtgtgaggattttcccccacacgccaagcagttctccacatatcaactcagtgtcctatagttcaagtcaattctgacactaatgggttactgcagaccccgctgggtaagggcttagtcccataggaccgcctcccacttcagatgccagtcacaaggcccaggttgtgaccggtgcttctgactagaagttggagttcccacagttcccctcctcaggtttggtaatttgctaggatggctcacagaactcagggaaacactttacttacatttgctggtttataataaacggtgttatgaggatacaggtgaatatctagataaagagggccacacccccctccagtgttcagcaacctggaagctcagcagatctcatggttcaaagtttttatgcagcttaatctccagccccatcacccagaggtcagtgagtggtgctgaaaggcccaaccctctaattacttgatctttctgtgatgagccccatcttgagcctgtctagggaccccaacaaaagtcacttaattagcatatactggggtgtgatcatgaggctttttatgaacaacaatgacactcctgtcaggaacttccaagggttttaggaattctgtgccaggaaccagggaaaaagaccaaatatatttcatgtatgccacagcttgtcataactagaatgatcctgtgtattccatctgcccattttgtcccctaaatgacgtatttttctttattccctaacgttactgaatgtaaaaaccaacaataacagttttgagcccttttatatggcaggcactgttcttagcactttccatgatttaactcatttaattctccttgattttcaccactgctgttatcctaataaccctactgaggacactacggcacgagaggcggagtgaaaagtggagccaggtcttgaacctgggtggaccagctctaagttagggcttggcacactggccggtggccgagtctggttccccatctgtttttgtaaataaaggtttattagatcccagccatgctcattagtgttgtccacggtggagtagtgtagttgcagcagagactgcatggcctgcagagcctaagctgttgactctgccatgctcattagtgttgtccacggtggagtagtgtagttgcagcagagactgcatggcctgcagagcctaagctgttgactctgccatgctcattagtgttgtccacggtggagtagtgtagttgcagcagagactgcatggcctgcagagcctaagctgttgactctgccatgctcattagtgttgtccacggtggagtagtgtagttgcagcagagactgcatggcctgcagagcctaagctgttgactctgtggccctttatggaagagcgtgccatccctgctcctcaccctgtgctcctgcctgccacactgatctctagaagctgtgtgctcctcctttcacttcttatgcttcagtttccatatctagttattcacagtgtcgtgctactttttctgacaaagcatctcaaacatagctcttcctgtccatcctcatatgaccgtcaccttgcaggatgctgtcaggttttacctggactaatgaaattccctgttctgtgatctccaggatctttccatttgtcctataccaatgctttccagtgttttccatgtcaggacccacacagtaaaaagatagtatttgtacagtacaccggggcaaatggctgtggctgcttggggctggaagcggccagctgagagtaaccacgtttctaagatgtaacttgatcccatacactggctcatacttgagacactcataactttttttttcctggcacactgaagggaaagccctactttacactgtcaccagacttctttttctgaaacatacctgattgtggtatctgcctgcatcaaaacgttcagcagctccgcatcacctaaggcctgaagtccaaacaccttagcatggcataaacttcctttcctaatggatttgataaccagggcagccctaacacattgccacaaaccagatggcttaaagcaacataaatttattctctagacgagaggtctgaagtcaaggggttgtggctgatcagtcccttctggaggctctgagggagaaaccgtcccatgcgtctctccttgtctagtggctgctgacggtcattgagattgctcagcttgcaggtgcttcacgcagcctctgcctccgtcttcatgtggccttctccttgtgtcctttttcttcttgtaaggacaatactcgttagattagggcctccactaaaccagtatgacctcttaatttgattacatctgcaaagacctaattttcgaataaggttacatacacgcttctgtgtggttatgactttgttttgggaagggaagacactattcaacctagtgtatctagtaacattccaagctacttttctcaactcttagctaactcctcatcccaaatatgtattcatccacatgtaccaatactgcccccaccgcacacatccagtgttccagttgtacagacagactcactgttccctgaagatatcaggccttttgtacggtcacccttccatatcctcaggttccatatccatggattccaccaacagaggatcggaaaatactcccccactggctgggtgcagtggctcacgcctgtaatcccagcactttgggaggccgaggcgggcagatcgcctgagttcaggagttcaagaccagtctgggaaacatgatgaaaccccatctctattaaaaataaaaaaattagccaggcatggtggcatatacctgtagtcccagctacttgggaggctgaggcaggagaatcgcttgaacctgggaagtgaaggttgcagtgagctgagatcatgccactgcactccagcctgggtgacagagtgagattctgtctccaaaaaaaaaaaaaaacaagagaagaaaatattccccctccccctaaaaaacaaacaataaaaagaaaaatataacaacaaaaaataatataaaaaaaaattcaggactgggcgtggtggctcatgcctgtaatcccagcactttgggaggccgagacgggtggatcacctgaggtcaggagttcaagaccagcctggccaacatggaaaaaccctgtctctactaaaaatacaaagttagccgggcatggtgatgcatgcctgtaatcccagctattcgggaggctgaggcaggagaatcacttgaacctgggaggtgggggttgcggtgagccgagatcgtgccgttgtactccagcctgggcaacaagatcgaaactccatctcaaaaaaaaaaaaaaaaattctgtataacaatgatttacatagcatttatgttgtattagttattataagtaatctagagatgatttaaagtgtacagggaggatatatgggtaggttatacgcaaatactatgcctttttaagagacttgagcatttgcagatttttgtatctttgaggttcctggaaccaactccctgctgatactgagggaggactgtatggttgacccagccctttcctcctacccgaccatttgcctgaaacttatatatctttcgacactcatttgcacagtgacgttttcttgtttgctcatagcatcgtatagattcttcttctgcttccctctgtgtcattaaaattatgtatttgcctgtttgtatcgccagttagctagattttgaactctgtaagagcagaagcatgttttaattgagttatatgtccacagcaccttgcaaagtacctgacacatgattctttacaaatggtttgttgaatgaatgacattcacgaataaagacagtcatcctattttcttctttgtcttttttacctcaggtacagaaactaatgcggaaaaagcaattagacgtagcagaatttagcatctattgggatgtcgattgcactttactgggggatttgcctcagatggagttacaggtacgatttcggcagggagatttgttgcaagacagcatggaagggaagcggcgtagggtcactgccacgggggcttttgtctcttgcctctctgattccagttcccacccactgttcctctaaagccattcactctcaagtgtgtttgcttgaggtacttgctatgtatgtgacttcgaacaatatatagtgctttgttttatgtatgttttaaatttatactagactatagttttctttggtttattttattcagtgaaagctatgtttttaagatgttgctgtttgtacttccaattcattgctctgaccactgcatagtattccaccgtttgcatgttcacgtaacatacttacacatcgagatgttttccatcatttatttatttatttttgtagagatggggtctcactctgttgtccatgctggtctcaaactcttgtgctcaagcaatcctcctgctttggcctcccaaagtgctgggattataggcatgagcccccacacccggcctaggcatccagattttaaatgaacagagcaccaggactgaatcttaaagaggaactttcttaccacatttatgtttaaacttcacctttggtggcattcccttaagtgatatttaaaaagtcataaatcatcagatatattattgtttgtgaaggattaaaaaaatctcaatcttttttttttttttttttttttttttttgagatggagtctcgctctgtcacccaggctggagtgcagtggcgtaatcttggctcactgagatctttgcctcccagatggaagcaattctcctgcctcagcctcccaaatagctgggtttactggtgcccaccaacatgcccagctaatgtttgtatttttagtagagatggggtttcgccatattggccaggccggctggtctcgaactcctgacctcaagtgatccacccgccttggcctccgaaagtgctgggattacaggtgtgagctaccacacccggccagtttaatccttctgtaaataatttgtaggtggtttaagtgaaacgggggaaaataactcatttttttcctccacccagggttatctttcacttggatactattgtacatgatggctttcttctttttttttttttgagacggcatctcgctcggttgcccgggctggagtgcagtggcacgatcttggctcactgcaacctccacctcccgggttcaagtgattctcctgcctcagcctcctgagtagctgggattacaggtgcatgccaccacgcccagctaatttttgtatttttagtagagacgaggtttcgccatgttggccaggctggtcttgaactcctgacctcaggtgatacacctgcctcggcttcacaaagtgctgggattacaggcgtgagtcaccatgcccggcaggtttttgttttaattcgattacataaacctgtatccatacagtaaaacaatatgcagctataaataataaaggtaaagatctttatgatgagtatgtaacagtctctaacatatagtatgaagttaaacaaactaaggtaaaaacagcatatatagcatttatttaagaaaacagaaaattacaggtttatctgcatatgtacagaatggcttgggtgggagacataagaagctgatgtcgttggttgcctctgaggaggtaagtgggtggctgggggatgagactaggaaagagatatttgaccttttttttttcctttaaaattttaaacgatgtgagtgtattacctattaagaaatataaaggttgggcgtggtggctcacgcctgtaatcccagcacttgggagactgaggtgggcggatcacaaggtcaggagatcgagaccatcctggccaacatggtgaaaccccatctgtactaaaaataaaaaaattagctgggcatgggggtgcatgcctataatcccagctactcgagaggcagaagtaggaaaattgcttaaaccggggagtcggaggttgcagtgagccgagattgcatcactgcactccagcctggcaacagagcaagactcgtctcaaaaaaaaaaaaaaagaaagaaaaaagaaatataaataataataaattaaaaatactagagagttttataacccagttttatagtgtttttggattttgatataatacactattgattagataacataccaacatgtaacttgatcctaaaaacatttgctgttggccaggcacagtgactcatgcctgtaatctcagcactttgggaggtgggaggatcacttgagccttggggttcaagaccagacagggcaatatagtgagatcctgtccctatataaaaagaataaaaatgaataaaaacaaaacagacaaaaatatttgccgctgtgacacagcctatggctgagctccactgtttgtcataaaaccccaacattgtaaaagagtgactaccagaaggaaagccattcggagcagagcaggtgttcttgtgacacacaggaggccatggccaggagcatggagagtcgcagccatcactacgtcctggagcctgtgtttgcatctgctcttttgaagagaaactgctccaagaagcccctgcggtctcggcacagtccccgtattgattgtgatattcagctggagaccattcccttgaaactctctcaggtatgccctttcttctcagtggcatctacttactgtcaaactggtgactgcagtgaaagtcttgatattaacgtatcctcagcaggaaagaaagttcatgtgagaccatttccctccagactaaagttgtgttaggtataaaactcaccgtctgttacatagttaaattgggttgatctcaggttagttttttttttttttttttttaattagttggtggtatggattggaaaggaggctagttttgttttggtatttttaagagctgaacaaaaaatacaagagatacggcaatgtataggcttaactgtcagggttcagagaaacatgtcacttgatgctgatattttggtctttcagtttgcactgggtttcaattcagtggatcaactaatgtgaattgttcttgttagatataggtcttaactgagtaaaagaaacaaacctattctaacctagtatctcttaacctctaatacaaagctgcaataccggcaaatcatggaattcctcaaggagctggaacgaaaggagaggcaggtgaagttccgaaggtggaaacccaaggtggcgatatctaagaagtaagggcttctcagtgtggtcatgaaattcatgttagagcctgttcttgctatgtacatagatcagaaatatgcctcactgtcctttacccatgtttggagataaaagtacagttgatttttctggtccttggaatgccattcccattgtttatcatcattgatattctttctgtatatttatttggtgtcattggcttactcttagactgagtgtagtaaaattcagaggatcctctcagtctcatttagcaagtagactgatgttgctctggtgggatctggtgtgtattataaatactttaaatattctttgaacctacttccctgtgttttttctcccaggttgtttggtcaacatttacatagtactctttgcagcctccatagcaaaactaaatcctgttttcatgttgcagtgataaacttgaccagtctgatataataaagctttttaaagatcctatgtatttccatgtctttagttagaagtattcacttaaaaatctttagtagtcaaatcctcggtaattatcttaagatggtatttaccttacagtcagccttcgatattctgtcagtagaggggagggatattataattcaaaccaattgagaactgtgttattgatatataaattggggatctattatttgatgttctttggcagatttgccttctccacctagtggtttaatattaagacgaacttaatatataaactggtggctgacaagagaaaagatgtctcaggagaggagtggggttatgtggattgtcctggattggtagccttttcgttgcttttgttgtaagaagtgattacatcgttatggactatttcagctgccgagaatggtggtattttgctttgaatgctaacttgtatgagatcagagagcagaggaaacgttgcacctgggactttatgttgcaccgcgctcgtgatgctgtatcttacactgacaaatatttcaacaagttaaaaggaggcctgctgtccacagatgacaaggtaagtggactgtggtcttgtgtttcttgtcttattcagaagataagaatgttctctcaaagactaaagaaaatgggatctgtgaagtaataaagtcccatgccaaaggggctaaattttataggatagagttggtcttagtagagtgagaactaagccaggagcatcctccaccttctgctgcccgaggagagccgggccatggggtaggaggaagaaaagacaccgtggtcctgctatgcctttgcgcccacacccctgccccccagctcaagagactgtttcatacagtcacccgcctctcttcaaagcctgatcccagtcctaattctcttacttcaaagtctgtaatctctgtgaactttggcctacgttttctataatcccagtggacttgattgaccttggatatttaggttgtagaggctaggcagaaaagggtgaagtacgtggtgaaggcaagctcatgttttagttaatagtagggctaaaggcccttagaatgccccctcctggagccctggcatgggaccccaccccttctctagctgtctgcctgctctcttttgggggaaggtattggggattgctttgcttcttgttttatttcagttttgtgagcatcaatttttgcagtagcagcttagactgtgtctgagattttggctcaggtactgccccttaactaaccacttgtttagtagactcttctaagcacaaaggaatacttttcccttcagcacctgctgtgtggtcagtgagggcaatgctgaagccctagtggttagtgcctctcctgccggcaccctgaggctgtggcccattcactttgctaatgcttttatcatcagtgtcagacatggttactgacacaggaaccttatgagaaggataaaataaaccagacattttggatgattttcttttcttttcttcttcttcttttttttttttgtgtgacaaggtctggctctattgcctaggctggaatacagtggcatgatcatggtcactgcaacctccgtcaccctgggctcaagccattctcccaactcagccttccaaatagctgggactacaggcccgcatcacaactgtctaattttttaatttttatggagatgagtttcatccttctgcccaggctggtgttgaactcatgagctcaagtgattcacctgcctcagccttcaccacccccagcctactctttttattttttttttttttgagacaggatctccttctgtcatccacgctggagtgcagtggtgcaatcttggctcactgcaacctctgcctccttggttcaagggatcctcccacctcagcctcctgagtagctgcacgtcaccatgcctggctaatttttgtatcatttatagagacagggtttcgctgtgttgcccaggctgatctggaactcctgggctcaagcaatttgcccgctttggcctcccaaagtgctgggattacagacctgagccactgcgcccagcccttggatgattttcttaaaggcacacacaaagacatagaagaagagaaaatcttatttacaactgagatgagcaagtaaagacgtaaaatctcctttgttcttaatgttatggtgtaagaagcagttcaggacagctaattccgcttttaaaaaatgtagctgggtatcatggttctttcctaactagagtgaaacaagtgaaaatgaccacgttcttgctaatctcctacatgaagtataaaagagctagggcctgcacacttcctgtggaaacttggtcctgggtttcaggaagagcgataactaggctgcttactcctcatctgagctaaggcatgtggaagccctttgtaaacggggtcagtgctgtccaaagtgtgggtgctgcaatagtccatatgctttagtgacttttttttttttttttttttttttttttgagatggagtcttgctctgttgcccaggctggagtgcagtggcgccatctccactcactgcaggctccgcctcctgggttcacaccattctcctgcctcagcctcctgagtagctgggactacaggcgcctgccaccacgcctggctaattttttgtatttttagtagagacggggtttcaccatgttagccaggatggtctcaatctcctgacctcgtgatccgcccatctcggcctcccaaagtgctgggattacaggcgtgagccaccgcacctggccacactttagtgactcttaaaactgagtactgctgttcttcgctccctctccattcaccattcatctcaggtgtcatgaaacttgttagtgattttttttttccccttctttcatagagctcaatttctggagaattgttggtgatgtttttaagaccaaataacatctactggattatatggaaaagctacttaagccagaaacagcaatcatggaactatttatcttgtttcttggccttcagtggaaatgcaggggaccagagaggtttctgtgctttacttttagtggcttgtgagggtgtccagtgtctctggatctacaacgtttgtgtttttgtttatttgcttttgttttcacccaaacaggaggaaatgtgtcggattgaagaggaacagagctttgaggaattgaagattttgcgtgaactggttcatgatcgatttcacaaacaggaagaactagcagaggtaagaaatcctctacaagaggatttgttcagacccagcacaccctgagtgctacagttttgatgtgcttgtgctcctgtggggaaacagcagcatatcacagcttgcttttatctttgagtactcatctctgctcctttgtgattgacacagagtctgcgggagcctcagtttgattctccaggagcctgtccgggagccccagaacccggtggaggcagtgggatgctgcagtatctccagtcctggtttcctggatggggtggctggtacgggcagcagaccccagaagggaatgtggttgagggactgtcagcagagcaacaggagcagtggattcctgaagagatcctgggtacggtgggagctggccttcacttgattcaaacaaattcgtctgttatttgtgcaacagcttgtggtatttttcaaatttaacaaaagtagatatttggagaacagtttatgttcatagaggctgagagaagaagtattttgggagatactccatttgtaactctgtgactaaatgtgcgtattaatgcagtttcagaaagagctgagaggcagagcgtgtaaaagaactaaatttgagcaagttcaacaattttaaactctgaagtttgaataccagtctagagcctctcttaaacctgcagtgtccgatatctagccataggcacaaatggctaactaaaatttaattcgaattgaatacaagtaaaaatttagtttcttaattgcactagcacattagccacgtgtgctcccagtgctcagtagccacatgtggttagtggccactgtactggatatcgcagatgcggaccatttcaccatgctgggcagcactgctttataccatcccttatcatgaatcttatcctccctggtttgataataagttgataagatcccttaaaaaacaattagggttgttttacattaggaaatattataaaatagtcacccatgactttggagttctttcttaacaaagggaaaaatagttaaataacatcatcataactgtgatcagtctgcttgctggtgcttttttattcttccacgttttttcttacagtcttttctcccttaccatttaggcactgaggagttttttgaccccactgcagatgcctcgtgtatgaacacgtatacaaagcgagatcatgtctttgccaaactgaatttgcagttgcagcgaggtacagtgactctgttacacaaggagcaaggaactcctcaaatgaatgaaagtgctttcatgcagctcgagttttcaggtacactgcccccaagaaactacctgccactgttgtctctctgtgggccaatgtccaggcgattctcattatttgctgtggggatagtctagaaagtcagtgcgaaaactgtattagctaatgtggaaccattgctcttaggggaaatactgggttaggttcatgtgaacctctggtcataacattcatcaactgatcagtacctaaccttaatttttaaaatgcgtgtctgtatttaaagacatttaatatagatatacagacagtccttgacttaggatagtttgactttggatttttcaactttacaagtggcacaagagttatacacattcagtagaagtcatacttcggattttgaattttgatcttttcctgggctagagataggtagtatgatattctctgaagatgctgggcagcaacagtgagccacagctcccagtcagccatgcggtcatgaggtaagcagctaatagtctacagtggactgtgtggccagatgattttgcctacctttaggctaatgtaagtattctgagcacttttaaggtgggctaggccaagctgtgatgtccagtaggttaggtatatgaaatgcatttttgacttactgtattttctttcttttttttttttttgagacagagtcttgctctgtcgcctaggctgcagtgcagtggcatgatcttggctcactgcaacctctgcctcttgggttcaagcgattttcctgcctcagcctcctgagtagctgtgactacaggcgcgcgccaccatgcccagctaatttttgtatttttagtggagacaaggtatcgctacgttggccaggctggttttgaactcctgacctcaagcaatctgtcctcctcgggttcccaaagtgccaggattacaggcctgagccattgcgctcagctgatttatgatattttcaacttatggtgggtttatcataactccatcctaagtcaaggagcattgtgttattgatttattaacattgaactcatggcctatagcactatacctcatgcctgaatgaagtttctctaatactcatattttttttgtaacgcacatcacagtcttcttgcactcaggaccactaggcagcgttttagcactaggggcttgttttaaacagtgaaaccacaaacaaaaagcacagaagcatgaaaaacatggcgccaaatagaagaccatgggagggatgcttgttcacagtgtgagagctgaaatgaggaggcagagcgttgccatgtttgaactcaggtgggaatgtgcatatcaggtggcttgaatttttttctgctctgtgagtgtctgaatgacagagtgccatgaggattaattttggagttacaaattttagcaagtaaacaaatgtgcaaatatggaatctgtgaataatgaggattgacttgacagtatttgccttctttttgtgactttgaattaaaggtgtataaataaatatgcagatgtttttgtgactttgaattaaaggtgtataaataaatatgcagatgtttggacatctcacaaatatttttatttcggtccataaaacagcagcttatttgagattcctgagtggctgaaggacaaatgattttttttaaaaagccagtttgtttgacttcataatgtagaaaattgagctgtcataaacttagtattaactagcagattacttgaactgaattgaaaaggcactatttaaaattccttctgctaggaaacttctaatggtgtttgtgtgtttagacagctggatagatacaggcacacttgattttattgcactttgccttattgcacttcatagacaccacattttttacaaattgacagtttaaaaatgagcaagtctataggtgccatttttccaacagcatgtgctcactttgtgtctctgtgtcacattttagtaatttgcccagtatttcaaacttttccattattattctgtctcttatggtgatctgtaatcaccaatttgtaatgttattattgtatttgttttggagtgctatgaaccatgcccatagaagatggtaacttagtcaatattgtgtatgttccaactgctccaccgactggccatttccttgtctcttttcctctcctggggcctccctattacctgagacacaatgttgaaattgggctaataaccctacaatggcttctaaatgttcaggtgaaaggaagagtcacatgtctctcactttaaatcaaaagctaaacgtgattaagcttagtgaggaagacgtcgaaagctgagataggccaaaagctaggccacttgtgccaaacagttagccaagttgtgaatgcaaaggaaaagttctggaaggaaattattagtaaaagtgctacttcagcgaacacatgaatgatcagaaagcaaagcagccttactgctgcaatggagaaagtttggtctggatagaagatcaaagcagccacagcctttccttaagccaaagcctaatgcacagcaaggccttaactcatttcagttctgggatggctggaagaggtgaggaaactgcagaagaaaagtttgaagctagcagaggctggttcatgagtttgaaggaaagaagccatctccataacataaaagtgcaaggtgaagcagccagtgctgatggggaagctgcagcaagttatccagaagatccagctaagatccttgctatgctaaatgatagattttcattgtagatgaaaaggccttctattggaagaaaatgccatctaggacttttcatagctagagaggagaagtcaatgcctggcttcaaagcttcaaagaacaggctgactctcttgttaggggccagtgcagctggtgactttaagttgctgatttacctttctgaaaatcccagggcccttaagaattatgctcaatctcctctgcttgtgttctatcaatggagcaacaaagcttggatgatgccagtacatctgtttacagcatggtttacagaagattttaaggccactattgagacctactgctcagaaaaaaagattcctttcaaaatattactgctcgtggataatgcatccagtcactcaagagctctgctgggagaagtataaagaaattagtgttgttttcatgcctgctaacacaacatccattctgcagcccatggatccaggagtaatttcaacattcaagtttgtttgtttctttaattaattgcttaatttattcagagatgagctctcacttttttggccagggtggtctcaaactcctggcctcaaacgatcctcctgcttcagcccccaaagtgctgggattgcaggtgtgagttaccactcccagcctcaacttttattattcaagaaatacattgcataggctgtagctgccataaatagtgattcctctgatggacctaggtaaagtatatagaaaagcttcgggaaaagattcaccattctagatgccatgaagaacatttgtaattcgtggaaggaggtcaaaatatcagcattaacaggagtttggaagaaatcaaccctcttggatgactttgagggattcaagacttaagtggaggaagtaactgcaaatgtggggtaaatagcaagagaactagaattagaagtggaacctgaagatgtgactgaattgctggaatctcatgatcaaacttgaatggataaagagttatttcttacagatgagcaaagaaggtagtttcttgagatggaatctactcctggtgaagatactatgaacactgttgaaatgacaacccaaggctgggcgtggtggctcacgcctgtaatcccagcacttcgggaggccaaggcaggaggatcatttcaggccaggagttcacaaccagcctgggcaacatagcaagaccctatctctactaaaaattaaaaaaaaaattagttggtcatggtgacatgctcctgtagtcctagctacgtggcagactgagaggtaggaggatcccttgagcccaggactttgaagttacagtgagctatgattgcaccactgcactccagcctgggtgacaaagcaagaccttgtctcaaaaaagaaaacaaaataaaaaaggaaatgacaataaagtttttaggatactaaatcaacttagttgctaatggcagggtttgagaggattgactgtggttttgaaagaaattctactgtggttaaatacatgctttatcaaacagcatcacctgctacagagaaatcttctgtgaaaggaagagtcagttgatgtagcaaacttcgttgttgtcttattttaagaaatcaccacagtcaccccaacacttcagcaaccacgccttgatcagtcagcaggcatcatcatgtaggcaaggccttccatcagcaaaaagattacaacttgctgaagattcacaggattgttagcactttctagcaataaaatattttaaaattaaggtatctatattgtagtttcaggcataatgctattgcacactcagtacactactgtatagtgtcaacatcacttttctatgcactgggaaaccaaaacatttgtgtgacttgctttattgtgatcctcactttattgcagtggtctggaaccaaacccgcaatatctccaatatgtgcctgtagatagatagggtttttttgtttgtttgtttaatttcaaggaaaaatagttcatctataataatcttctgtaaaatagaatatctaatattttcaaaaacacattaggctctcataagcattgtatcaactattttatttatcttttatagatgtaaaacttctagcagagtctcttcctcgaagaaattcctcgttgctttcagtccggttgggtggactgtttcttcgagacctggctacagaaggaactatgtttcctcttctagtcttccctaatccagtatgtacaacagttggatagttaatgtatctaaggtgttggtaaattgtagtctgttttaggcaaatgataactgattcattctgacatttgatcatcttgagactgatgggctgggattagaaaagtttcttgaaattgttaaagagcaaatgttggtgacattaatggctatgccttcttgcactcctgtattgtagccaccatggtatattttgctctgatttggaagaaaatgctataagaccactattttctgcatttcaaggtcaatgtttgggtttcctctgtatctgacagtcattttcatgccttctgacccttagttactgacatgaaatctcgtctcgccagggtcccaaaacagaaacatctcaagttttctatatatatgtaatttttaaaatataatatacgttattaacgataagatctttgatcttaagttggcaacaagctgtctaaatggctgagtagttaaccccttattctgtccatagttttgttttggttgggggaacgttatggagagggtgggaaggctgacttaaagtttgaaaagttagacatgtttaattttcatttagcaactgttcattaaatgtgccgagtgcaaagtagcatattgtcagtacaaaggaaaagatgtggtctcactagattggaaaaagggcagaaaacgaaacaattctgcaagtagtcaatctgaggtaaagtgagttttgatttgatggtgctaagggagtgtgttgctgaagggtaagatgggtttgtttagtgaattgtcccctctcacgctgacgtttacgcatttttgtgtgtttgtttaatagcaaaaagaagttggcagagtctcacaatcttttggtctacaaactacatctgcagacagaagtgatcattacccaggtaatttgtcctatgttgtttttttaaaatttttaaattttttaaattaatttttctttgagacagggcctcgctctgtcacccaggctggagtgcagtggtgtgatcttggctcactgcaacctctgcctcccgggttcgagtgattctcatgcccttgccaggattactggtgtgtgccaccatgtctgggtaattttagtatatttagtagagatggggttttgctttgttgtccaggctggtcttgaactcctgagctcaagccacccaccctccttggcctcccaaagtgctgggattacaagtgtgagccaccatgcctgagctttttttttttttttttttttaataatttaaaaattctttttgggggactttccaacaaaaaccagatcagtagtctttgatcagtagtaaaagagggaatgttttctgttttgtgcgcagtggtttgctgtgtacaccagggtttcacttgaagacagcctggtcctctctcagtggagctgcgaacttggggctaactgggcaaccttgcagggtcttcaggtccttggtttccatgatatgggagctaatacaacaggccagtctacacaattcctgtggaaaattaaacagtcaatcctgatgaggctttctattttaaagataggcataaatgtgaactaattgaaaaataatttagaaaatgtctgtttttccagaatccctcacaggtctgttaataaggctatagtttttgccttgttccgtgttcttattcctgttctttcctttagctgcagatccagatggccccgtttttgagatgctgtatgagagaaatccggcgcacagccactttgagaggcggctcaatgtcagcacaaggcccttgaacatcatatacaatccgcaggccattaaaaaagtagcagactttttctacaagggaaaggttcatacctcaggttaacttttttgtttgtttgatcttatgttccttttgaaaaacatctttattgttatttctggtgttctggacaagggttattcagatgctctgatagtgacaaaaaaggcctgcagagtaagtcaatagggttgccctgtcctgttactaaaccagggtagatatttgtggacagtcttttccaagagaaatctatatccttaaatattttctctttgtttgcctccatttagcgtgtattttttcatacttttcatttctgttttttttcccatttttatttcatattgtcattctgaataatggcaccaaagaatagcagctgtactttttgaaagccactacctttgaatcggtacctatcttaaaatattaccaagagtaattgaaaggcaataaaatagtatggggtgggggagttcatcatcttttttaggtttctcaattgcaaaacattcttataaaaatagatgaaagtactacaggcataaagtagtttcatgatattgatttaaccatggctgtatgttcagccagaattgtaactggaaatctgcatcttggaactgaaaagcaatgatctccatactttttatttcactatgacagtggtttccttggctacccaggatattttagaccagtgaactgaggaggaatgttcaagaatttccttctagatgacaggatcagtggtctctttgacctcctttgtgcagcattaaatactgcaaagttgtaaatgtaatcactgatttatttatgcctccgtttgttctccaagaagatttgaaacagtaggtgcagaaaaaatacttttatggacagggagatttataaaacaatagtattttcctaaatgtcccttccccctttattacaatgaatctgttttagtttttggactagttttttagtctcttcatataaacagtagccataaatgccgtgacttcattgctctgtcactgatagaatatagaaggtggccaggcacaatggttcatacctgtaatcctagaactttgagagtcgaggctgggggattgcttgagcccaggagtttgagactagcctgggcaacatagtgagacctcatctctactaaaaataaaaataaaataaaattaatcaggcatggtgctgtgtgcctgtagccccagctactcgggaggctgaggcagaaggattgcttgaggctgggagttcgaggctgcagtgagctatgattacaccactgcactccagcctgggcaacacagcaagaccctgtcttaaaaagaaagaatatagaaaggctgggtgtggtgattcacacctgtaatctcagcactttgggaggctgaggcaggcggatcactagaggtcaggagttcaagaccagcctagccaacatggtgaaaccctatctctactaaaaatacaaaaattagctgggtgtggtggtgtgcacctgtaatcccagctactcgggaggcaggagactcgcttgaacctgggaggcggaggctgcagtgagccaagatcatgccactgcactccagcctaggagacagagcgggactttgtcttaaaaaagaagaagaagagaaaaaaaagaatatagaaggcatttcctttgaaattccattttctctttcagtgctttttaagaattttgaaatatagtagtttggaatctttcagaaaatggcttaagaaattctagtaacttaggtacacttctctcacttgcctcctctccccccatggctgtccattcacttacgcttttttgtctcattcctgttaccctgtattatgccaggtcatactggagtaagaaactgttgttactgatttgtttttttccttgagacagggtcttgctctgtcaccccaggctagagtgcagtggcgtgatcacggctcactgcagcctcagtctcctgggctcaggcatcctcctgccttggcctcccaaagtgctgggattacgagtgtgagccaccatgcccagcctgatttttttttttttaagctttgatggacattcttggtgagaattgatgtagcacttttgttcacccagccgtgtgaaaattctgactctgctgtgtatttccaaccttgcaggttttggttatcagtctgaacttgagctgagagtggctgaagctgcccgaagacaatataacaagctgaagatgcagaccaaggcagaaatccggcaaactcttgatcgtttgctagtgggtgatttcattgtaagtgggcatccataaacactctttggggattggggaaggggcaggaattctttccgtcaagtcactacttactgtagataggcttacttatatcaattatgctgactgagtaaactgaaaatattaaatccttatcagctagcatagaatagaatcttgtgtcttttatagtcagggtttagctaataaaatgaatgactgtgactagattctgtgtctccttgcaccaggatgaggttactttcaagactcatctttgtgctgggtgctatggctcacacctgtaatcccagcactttgggaggctgaggtgggcagatcacttgaggtcaggagttcgagaccagcctggccaacatggtgaaaccccatctctactaaaaatacaagaattagctgggcatggtggtgggtccctgtaatcccagctgctcaggaggcggaggcaggagaatcacttgaacctgggaggcggaggttgcagtgagtcgagattgcaccactgcactccagcctgggcaacagagtgagactgtctcaaaaagaagaagaaaaaaaaaagactcgtgtttgttccattttccagacctgatactttgtgcatgtttcatgtgagagtttctcttttttgcttactgttaccagaagagacaactggaatgatgccccagcttctattctagggtgtgatgattaggtactttgtgatgccaaatggccagctgccatgaggatgccatagatagggagggccaagagacatcttcacagtccagtaggtaggctgggcaaggtggcccatgcctataatcctggcactgggggaagcggaggtgggatgatcgtttgagctcaggagttcgagaccagcctgggcaacatagtgagaccttgtctctacaaaaaataaaaaaattagctgggcctggtagcacatacctgtagtcccagctgttcaggaggctgaggcgggaggattgcttgagcccaggaattggagggtgcagtgagctatgatctgccctctagcctgggtgacagagtgagaccttgtctcaagaaatcaaaatagtccagtaaagcacagtttctcaggtgacatggaggtgcactgctacaatacagcagcaggtggcacagtgagaaaaagtgtggcttcttttggacagtgcagagtaagttataggtgtcagagaagcagaaatgatccaagtaaaatgtggtgtgtagtatgggatggagaattagtcctgttttttgttttggtgtgtgtgtgtgtgtgtgtgtgtgtgtgtgtgtgtgtttctacataaagtatgacaattagtattcttgtaaacaaaagaggtttctttttggtaatgtaaattagcttttgccacatacatacagttgaggctgattttggttggagggaagaacaatgaacaaatcatgaattggtgtgttatttatatttcaaatgtcaaagcttatgtttctcactaagatattttggcatggaagttcatggttaccaatgcccctgaataagtaaaaatgtttagaattctatgtttatttgaattctataatttctataatcctttaaagtattaaaccctgtaaattagaaacaaaatctttcttaagtacagactctcccctatttagttatttgctattttttttctcccctgttcagatacttgtctgtggtaatttctcagatcctcaagcatttacatctacttttgtcttagactttttgctgtaatacattagatcactgagtcactccataatcctagctgcagcttccagaaatgcttgagcaccatggataaagctgttgggtttcggcagttatggttaatgactgttttatttgtacaggaggagagtaaacgatggaccgtgcggctggatatttctgcccctcaggtgatatttcctgatgatttcaaattcaagaatcctgtgttagttgtcgtggatctaggaagaatgcttttgacgaacacccaaggtatagtgtgagtgggaaataatgaaaacctgccttggtagatggatgatctatctatgattatctaagtaaagcttaataaaatgtttatgtaacatttttatatgtaacatttttaaacttcaaggttcatctgtaactttttaaataatgaaataatgaaaacatatcttggtagatcgacctgtctatgattatctaagtaaagcttaataaaatgtttacataacattttaagacctgagggttcacttgttacttttaaaataatagctttattgagataattctaagttttaaatgtatagtgcggttgtttttggtatgtggatagaattgtgcagttctcactgctatttaatatcgggaggacttttgcatcttccccgactgaaactctgtgtgtacccattaaacaccaattccccttctcgctccccatcccctggcaaccactaatctttctgtctctggatttgtctgttctgaacatttcatatgatggaataatgccatatgtggccttttttgtctggctttttcgtttagcatgacattttcaaggttattctgtgttgtaatatataccgatacttccttccttcgtatagccgaataatagtccatcgtgtggctgttccgcgttttgtttatcctttcatttgttcatggccatttgagttgcttccactcttttgctattaggcatattgctgctgtgagcattcatgtacaggtttttgtataaacatatattttctttttcttttaaattttttttcttttttatagacccccatttctgcaatgtagacatatatttttaattctttatttacctagaagtggagttgctgagccatgtggtaactctatgttttaatattttgaggaagtaccaaattgtttttgtttgtttttttgagatggagtctcactctgtcgcccaggctggagtgtggtggcgccatctcaggtcactgcaacctctgcctcccaggttcaagcaattctcctgcctcagcctcctgagtagctggaattacaggtgcccaccactatgcccagctaatttttgtatctttagtagggatggggtttctccacgttggccagtctggtctcaactcctggcctcaggtgatccgcccaccttggcctcccaaagtgctgggattataggcgtgagccaccgcacctggccaattttttgtatttttagtagagacagggtttcgccatgttggccaggctggttttgaactcctaacctcaaagtgatctacctgtcttggcgacccaaagtgctgggattacaggtgtgagccaccacgcccggccaatttttgtatttttagtagagatggggtttcgccatgttggccaggcaggtctcgaactcctaacctcaagcaatctgcctgtcttagtctcccaaagtgctgggattgcaggtgtgagccacgatgcccagccccagtggtgtatttttatagttgtcttggcgcactgctcagctggagaaagaggagctgattgtggactctggggccacacaattgcatattgatcagttaccgctcaccaagcactacctcggcactaggaagactgtgttgaccaagaaagatgagacctctcttctctcagaacattccagtggatgctgggccgtggtggctcatgcctgtaatacccagcactttgggaggctgaggtgggtggattacatgaggtcaggagttcgaggccagcctggccaacatggtgaaaccctgtctctattaaaatacaaaaaattggccaggtgcggtggctcacgcctgtaatcccagcacttagggaggctgaggtgggtggatcacctgaggtcaggagttcgagaccagtctggccaacatggtgaaaccctgtgtctactaaaagtacaaaaattagccagtcatggtagcaggcacatgtaatcccagctgtccgggaggctgaggcaggagaatctcttgaacctgggaggtggaggttgtagtgagccaagatcatgccactgcactccagcctgggtgacagaatgagactccatctcaaaaataaataaaaataaataaataaaaatgtaaaaaatacaaaaaattagccgggcatggtggtacatgcctgtaatcccagctgcttgggaggccgagacagtagaatcgcttaaacctgagaggcagaggttgcagtgaactgagatcgtgccattgcactccagcctgggtgacagagtgagacttcacctgaaataaaagaacattccagtgggggaaacaaatgaacacacagaaaaaggaaaagaaataaaagactctagagagggacgtaagaaagggttggtgaaagcagctcacgcccatggcaaggcaggggagaagtggggaggcagcattgggtcagcaggtggcgctcatgtcagggggcctccagcttttttcgtgtccatacttttttatatttgtgttttgatttccaaatttataggtaaattcacacttagaaaatggtaaacaaagatattatgcttaagagttttcctcagttttcttaaacaaactggggttggttgattctctacctttcataattattacattaagggaaagaggagggaaatagcagacatatatttgaatcttcttttttttatcttcagataactccaggaggaaaagtagggatgggtcagcatctgaagagacccagtttagtgatgatgaatataagacccccctggccacacctcctaacaccccacctcccgagtcaagcagcagcaacggagagaaaacacctcccttttctggagttgagttcagtgaagaacagcttcaagcacatttaatgagcacaaagatgtatgagaggtactcgctgtcatttatggacctccagatcatggttggacgagtgaaagacaattggaagcatgtccaggatattgacgtgggaccaacacatgtggtagagaagttcaacgttcacctacagttagagcgtcgattgatttatacttcagatcccaaatatccaggagccgtgctctcaggcaacttaccagacttaaaaatccacattaatgaagataaaatatctgcactaaagaattgctttgctctcctcaccaccccagaaatgaaaacttctgacactcagattaaagaaaagatttttccccaggaggagcagcggggaagtttgcaagactccgtaatgaatttaacccagagcattgtgttgttggagcagcatacccgcgaggttctggtggagtcgcagctcctcctggcggaatttaaagtgaactgtatgcagcttggtgttgagagcaatggccggtacatttctgtgctcaaggtgtttggtaccaatgctcactttgtgaagaggccttatgatgctgaagtctccctaactgttcatggtttgctcctggtggataccatgcagacatatggtgctgattttgaccttttgatggcttcacataagaacttgagctttgatattccaacgggaagccttcgggatagcagggcccagtctcctgtctctggaccgaatgtggcccacttaactgatggagctacactgaacgaccgatcagctactagtgtttcacttgacaaaattcttaccaaagagcaagagtcccttattaagttggaatatcagtttgtgagttcagagtgcccatcgatgaatttagacagtactcttcaggtgatttccctacaggtgaataatttagatattatcctcaatccagagacgattgtggagctaattggttttcttcaaaaatcctttcccaaggaaaaagatgatttaagtcctcaacctttaatgactgattttgaaagaagcttcagagaacaaggaacttaccagtctacatatgaacaaaacactgaggttgcagtggaaatccataggctgaacttactgcttcttcggacagtgggcatggcaaatagagagaaatatggcagaaaaattgcaactgcaagtataggtggcaccaaagttaatgtctcaatgggtagcacgtttgacatgaatggttctcttggctgtttacagcttatggatttgacacaagataacgttaaaaaccagtatgttgtcagcattgggaattctgtaggctatgaaaatatcatcagtgatattggctactttgaatctgtgtttgtcagaatggaagatgcagccctcactgaagctttgagtttcacgtttgttgagagatctaaacaggagtgttttctcaacctgaagatggcttctttacattataaccactctgctaagtttttgaaggagttgacgttatccatggatgaactggaagaaaattttcgaggtatgctgaaaagcgcagccaccaaagtcaccacagtactagctaccaagactgccgagtatagcgagatggtatcgctctttgaaactccaaggaagactcgggaaccctttatcttagaggaaaatgaaatatatgggtttgacctagcttcgtctcatttggacactgtaaagctaatcttgaacataaacattgaatcaccagttgtttctatccctcggaagccggggagtcctgagttgttggtgggacacttgggacagatattcatccagaattttgtggcgggagatgatgaatccagaagtgaccgtctgcaggtggaaatcaaggacattaaactgtattctttgaattgcacccagttggcaggtagagaagctgttgggtctgaaggaagccggatgttttgcccaccttccgggtctggcagtgccaacagtcaggaggaagctcatttcacacgacatgatttctttgaatctttgcatagaggtcaaggtgaggagcatcagtcttttgttctattttgtttaatgattgaaaacccagctcacggagtcctttgcgtaaaacagcaacaataaaatccttttcttttagaataatcctcagttaatatttaagaaatcaaagagttttaatagaatgccttgtagtaggttggcatgttttcacccttttccatttaatgtcatatttgacaaaacaggaatttacttacttttatttttatttttttggttttttgagacggagttttgctcttgttgcccaggctggagtgcaatgatgcagtctcagctcactgcaacctctacctcccaggttcaagtgattctcctggctcagcctcccaagtagctgggattacttacaggcacccgctaccacgcccggctaatttttgtatttttagtagagacagggtttcaccatgttggccaggctggtctcgaactcgtgacctcaggtgatctgcctgcctcggcctcccaaagtgttgggattacaagtgtgaccagccgcgcccaggcaggaatttatttttttgaagtgttccagcttgaaactgtatgagtgctcatttacagagatgcttcagtggatggatgttgttaaagtattgtttaatttggtcaaatatatctgattttctgttcccaagctgtcgatccttcctagttaaacattttagcccaagatgcctcaaggggttgatgtaaatagtttgtggatattatcttctttaatattctgccatcttcttctataatgggttggtccaaggttctaagaataaaagcttatgtttgtattctggatctgatcagctaaaaccaaacagtccaatctgttggtcttggcacgcagagatcaggtaagtcctagagcacgcctttatttattggtgatgaaattaatgcctttgagaacttacccttctgtggtcatcagatgttaattcactgatttgtttttatacttatcaaaagatagctttctctgcttggataaaagttgtttacttagaacttgtattgtcctagattctgatttaggcctaataagagggatacatctgtatctgaaagctaggtaaggatgaataattcggtttggaaaatgccagcttgggtggctcagagaagcataatgtagtctctggactggaataatgttcaccacatcgtgctttgaagctaccaagtggagcatgtgatgaaaatattgtttctttttttgtgtaaatgtatcttgtacctcagcttgctatgagttttggcctcaggatagctgtcaaggtttgctctcaatcatagaccccgggtgccaggctaacctgccctcctggtctaagtgtaactcatgggctgtattttgtatattctacgtttaatcagcagtaatgaagtaaatattaaggtttatggtctatcatttcatctcttttatgccagcttttcacatcctgaacaacaccaccattcagtttaaactggagaagatccctatagagagagaatctgaattgactttttctcttagcccagatgacctgggaacttctagcatcatgaagattgaaggaaaatttgtcaatccagttcaggtaaattcatgtcagggcagttgaagtcatatgtttatattagtactctataaatatgatatatatttatgtatattacatgttggaaggaatatatattttcaaagatatatcacccatgcataataccattgttgaaaccttgttccaataattgtggaatccttttgtcatggggaatccgtcttgtcagcctttttcatatggaggaggggtgggttatctagaggaagacggcagattcttaattccattgacattcagaaatggggaaatgattgcttacaaagtcagagtctcctttcccaggaggatatcattcttgtcacacttagacatacttaacacagccagtgaaacattgtgatcatctgagctgtggacagatcctttcaacagagaattagtcctgccctctctgaaatgaaatgggccaggatagggatttctttttttatgggcatgcatgtatgtatacaccttttcttttttttccttcaaaagtgtcattttccctgatttcacagggacgagagcaaagagtagtacattataaaacagcagtgacaggcaggctcttaggacggtctgtggtctgtgtctggcacaacagtagttggtctgtgtctggcagctgttctggagtaacccaggagtgctgttgatggagtgggcctgccttttgacatttgtggttcctcccaggggtctctgggacccctgagagaactactccaaagctttcccttctcagactaagcttttgccccatcagtggtagctaccaggacaaatttttcaccttaaatctagcatgtgatgtaaattctattggattatgttgacttacttttttttttttttttttgagacggagtctcaggctacagtgccagtggtgtgatcttggctcattgcaacctctgcctcccagattcaagcagttctgctgcttcagcctcctgggtagctgtgattacaggcattcgccaccacactggctaatttttgtatttttagtagagacggggtttcaccacattggccaggctggtcttgaactccttgcttcaagtgatcctcctgccttggcccccgaaagtgctgggattacaggtgtgtgccaccatgcccggcctatgttgacttatttttatggttaccattgacttaactgttgttttgatgaaaatcttaaaaacgttattgtagataattctttctttaaaaataattaagataattatttgaattctttaataattgattagtaattaatttaataatttaattttttaaaaagttgattatgaaagaatgtaagcctatacaaaagtggaatagtctaatgagctttatgtgcccatcactctgattccacttatgaagattttgccacatttgttttatctattttttttttttttggtgaaatattttaaggtaaatcccagatgtcatgccattatcacccctatgtatttagagtgtatttccaaaaactaggtgcttcttcttacataaccacagtggtatttcatgccttacaaaattaatgagcattctttgatactatctagtcgattttcagatttcagaaatattttggatcatttcaaaaatgtctttgttttgggtttgttggaatcaggatacagacaattggaagcattgcatttgggtgatacattgtgtaggtctctgttcatctagtttccctctcttttttgtccccccatgtcgtattttgttgtggaactaagtcagttgtcctgtggaatgtcccactttctggatttggctgttcgtgtgccacttaatttgttctcccacatatttcctgtaaaatctatagaacaggtttagttctataggtttgactggattcgggtttcttttttggcaggggagttgggaggtagacttcaggtaggtggtgctgtatacttcatattactttatatcaggaggcacataatcaggtcttttttctctcttattgatgttaaagtggataattgtatttaggtggcaagagccttgatttctccattgcaaaattccctgtcagtcattcacataatggtttattccactaatgaacttcgatggcacacattatttaattaggggttacaaaatggtcactttttctaattccatcattatttctgtatctattggttggaattcttctgttaaaaattgcccttcattaaataaaaaacttgcctgaaaattttttttttttttttgagacagggtctcactctgtggcccaggctggagtgcagtggcatgatctcagctcactgtgtcctgcacctcctgggctcaagcggtcctcccacctctgcctcccaagtagctgggactacaggcctgtgccaccacactctgctaattttgtattttttgtagagacaagagtttcaccatgtagcccaagctggtcttgaactcctgggctcacacagtctgcctgcctcggcctctcaaagggctgggattacagacgtgagccactgtgcctggctgaaaatatttttaataagaaattgtaattaaaaatgaagcaaaggagaaaggaaacataactaatcatggatcatcatcatttttatctaaaaagtactaccagtactaaacattggctgttactctaactggtgatgatcagccagttttagaaccatgaaccttgtttctcaatcctgtggtgtatccacgccagacttttgtcaacactcttcagtttctgcattcatttttgtggggtcagaaaaagtgactttgttgattcaggcataatccgcagtacttattgaactcttattgtatgtagattattgtgtagggtgctgagggagggccttgtgaacagaagtgggtcataaagaggtaaggacaaaataaatgaaaagagatagtctttgctatcaggtaacttacagcctcatgtaggaatcatgtggcaactgtagacatttatgggcattacatctacgtgcatttaataataagagtaactgaatttttctcttttcaatacaggtggtgttagcaaagcatgtatatgagcaggttttacaaaccctggacaatctcgtgtacagtgaagatctgaataagtatccagccagtgctacctcctccccttgccctgattctcctctgcctcccctcagtacctgtggagaatcttctgttgaaaggaaggagaatggattgttcagccactccagcctttctaacacctctcagaagtcattgtcagtgaaggaagtcaaatcctttactcagattcaagccaccttttgtatatcagagcttcaggttcagctaagtggagatctgactttgggggcccaaggtcttgtgagcttaaagtttcaggactttgaggtggaattcagtaaagaccatccccagactttatctattcagattgccctgcattctctgctgatggaggacttattggagaagaatccagattctaaatataagaacctgatggtgtctcgaggagcccctaagccatctagtttagcacaaaaagaatacctttctcagtcttgcccctcagtgtccaatgtggaatatcctgatatgcctcggtctctcccttcccacatggaagaagctcctaatgtcttccagttgtatcaaaggcccacctctgcgtcccggaaaaagcaaaaggaagtccaagacaaggactatcccttgaccccacctccttctccaacagtggatgagcccaagatacttgttggaaagagtaaatttgatgattccttagtccacatcaacatattcttggtagataagaaacatccagaattctcttccagttacaatcgagttaaccggagcattgatgttgattttaattgcttggatgtgctgatcacactgcaaacctgggttgtgatattagacttttttggaatcggctccactgcagacaaccacgcaatgaggctgcctcctgagggcattctgcacaacgtgaagttggagccacatgcctccatggagtctggacttcaggatccagtgaacaccaaactggatctcaaggtatcctcagttccctttggctcccttaagctctaaaaatggatttgggcttgttgatttaaatacaagcactttacatttactttggaaaatatctcttgttggcaggggagctatctagtcttctaggtgtttgctacgaaaggtagacatgaatattttgggaaaggttttactgtaaatcccatctggaggcagggaaaataagtggtttaagaatcttacctttcctttgagctctataattcagtggagttactttgcttctctgaaccgtagtttcctcatcttccatcatctaagatgactaaatgaggtgatgtgtggaaggcacctagcaaagtgtgtaatctgtaatagcaactttaaagtgtggcttttgtttctgtctccccattctctcagaacattatttgcttgcattgagggcaacagcgtaactgttaagaatggtctcaaaagttggactccgtgagtttgagtcctggtactttcactgtacccatatagctatgtgacctggggcaaaccacttggcctcttttgcccttaatgttttcatgagtaaactgaggatgttcagtggtgcccccatcatagggttgttgtaaggccctccacacagtgtgtggcacacaataaggatttaatgaatggtagccattattatttttatattacatggattaccatacttataacttgtccttgatactcatactgtaagtattaagaaaaaaaccataaaaaagacagcatttgagtttaaggctattctgctctgtgtgatagaccagtaggatgtgaaagcagttaacctgaatagcccattcgagggcacataggcctgctgtcactagcactcgtccagagccctggaaccccggccgtggctggtaacatttgtgtgcctcaaggatgttctttatccacatgtcttagcatgtgtggacttgcacttcctgctggggagaagtcagggaggagaatcacattttatcctgttgccattttcttatttcccttgctgatagtaggcctcattcctctagaaatggaagacatctcagggtagagatgggaaaggaccagcttacctttcttgttcagtgtctggtgaatgaatgactttgcagtactccgaggcctctggtacttttggtttagcaaggtggatggaacctggagaggcgttagccattcctttgggcttcatgtgtctgtacctggaactttattcttgcagtgtctgtgatgatctgcgtcaggaactctttggtgttgaatatgcagtgctcccagagggctttgccttgattgatgtggctggttctacaagggaataggactggataagtgttcctcaacaatgcattttttaaaataagaatttttgacaaacatttttattgtgaaaaaattcagatacatcacagagaaacagtataatgaacccccatttgcccagtcctataattcatcacatttactttatgccttttcttctttgctgaagtattttattttatgtatttatttatttatttatttatttatttattttttttttttgagacggagtctcgctctgtcgcccaggctggagtgcagtggcgggatcttggctcactgcaacctctgcctcctgggttcaagcaattctcctgcctcagtctcctgagtagctgggattacaggtgcgcgccgccatgcccatctaattttgtagttttagtagagatggagtttaatcatgttggtcaggctggtctcaaactcctgacctcaagtggtctgcctgcctcagtctcccaaagtgctgggattacaggagtgagccactgcgcgttgcctgctgaagtattttaaagcaaattccagatatatcatttcactctacatacgtcagtatttatttctaaaaaaacaatggacataccacaatgcattgtcacgtccaactaacaagaattccttggtattttctaacaccagtccataatcagattctctgattgtctcaaaaatgcccttttattggtggattgtagaggaatgaatggtttaagaaacttcttgtctttctattctgttggtctctataattcagtagaatactgtgcttttgtaagccaaagttttctcatttacaaaataaggagaattaaataaaatgatgcatgaatttctttcttcctttcctttcctttcctttcctttcctttcctttcctttcctttcctttcctttcctttcctctcctctcctctcctctcctctcctctcctcctctcccctcccctcccttcccttcctttcctttccttccctttccttcctttcctttctttccttcttttcgaaggagtcttgctctgttgcccaggctggagtgcaatggcatgatcttggctcactgcagcctctgcctcctgggttcgagctattctcctgcctcagtccctcgagtagctgggactacagatgtgtgccaccacaccctgctaatctttgtgtttttagttgagatggggtttcaccatgttgcccaggctggtctcaaactcctggcctcaagtgatcggcctgccttggcctcccaaagtgctgggattacaggcatgagccactgtgcccagcctgatgcatgaatatttttgaatcaggatccaggtaaggttccatgttacatttgctgtcatgtcttttaaatctcttttaattatagtgtatctgcccccctccaaccccaccgcctattgacttgttacagaaactggattagtgccttgtagagtgtcccacattttaggtttgtctgttttcttgtttgactgtttgacttcttttatcctctattttaacaagtggatgttagctctagagaccccatcagattcagttcagcttggtaagaacatgccagaggggctgctgagtgcttcctgttgcattgaggcaggaggcatacaacgtctgatcatcatctgttagtgacactaagattcgtgggaagagctggttcaagtggtggtggtggtggttggattcctccaaacaaagcatttttagacccagtgtacatgttcttttggtaaaattaaatgactagaggttttcattatttttattttatctttttgagacagggtcttgccctatcacccaggctgtagtgcagtggtgcgatcttggcccactgcaacctctacctcctgggttcaagccattcttgtgcttctgccttccaaatagctggaattacagacacctgccaccatgcccagctagtttttctgtttttagtagagacggggtttcatcatgttggccaggctggtcttgaactcctgacctcaagtgatcatcctgcctctgcctcccaaagtgctgggattacaggtgtgagccactgcatccagctgactagaggtttttaatttccccatgatgatctcgccttgagattccttctgtgcctgggtcagtgtcagaaatcatactgcaagggaactggagttccccccacaaagtcattgctccagctatagtaacccattgctttttctctgtcttcttctgtaaatgattttttttcttcctttccttctattacattccttttttcttttcccatctttttatcctcctgattattcatgcaccagacatttcttgagtacctactttgtggcaggcactgaagacaaaggggtgaaggcatggtccttgctgttaaggagtggagggtgtgaattgaagattaaatctgctctcagtcttttcctcactccttccttctcttccatcagtgttttgtcccctgtgatgttactcaaagcaaaaaaggttgttgggaactgactcaacaaatcctagacatataagatctttttaatagttacaattacaatattgcattatgaaatttatttgttacaaagaatgctacttccaagacaggggattttttcttctatttgtagttgtccctaggaaagaaaatctttgattatggcttttaggtgaagtctcagttggttaatggtgggcttctattaaatatttgttcagaggcagtaaatgggattctaaatcatatttatcattttgttttgaaaaatttatcaaaatgagatttaatggatctgtttgagttactatagaattgtataatattaatgatgaatgccaaaatgagaaaaattatttttataatgtaaagcatctcatgaacagaaaatagacaaggcaagcatagagaaggcaccacagaaactgaaatttagactgtccagtctccgccctgtcctcaggtcgtggtttctctggcttaagaaagctgaagtgaaattggcattgttaaaagcattaccttcaagtttcccaagcctttttgcattttccttgattgctctgccgttttcctgaaagataccttttctccccagtaatattggccttgctttatcttgtctgttcctaggttcattcactttctctagtgctgaataagaccaccagtgagcttgccaaagcaaatgtgtccaaattagtagcacacctggaaatgattggtaagtggtggggggtggagggaagcaaacttgcaaaatctggtcagcatttgaacattgtgatcacaaattgattgtcctcacgtgctgagtaaggtgtggcagtggcttgattgtggttattagtctggccaggattcatggtggtggttcccaaatgctggcttatggatcagaatcatctggatagcttgttaaaagtgcaggtgttggcacagcctcttccctcctcctgtctctcatctccttcccaagaatctgattaagttgagatggagccctggtgtctatctgtgttttcaacagactctatctagggtgcccatataacttttttttggttcaaattgggatatttttgagagttaaaggggacatcattaatataattacccctagaaaacgggcatacaacagggctgtctctgggaaaccagaggatatgactgcatctagagtcataaattgggggagctaccagtagaggccatggtgttatgcaggaggacattgtagcaaagctggcattctttattctgtgtttttgagacaggatctcgcttggttgcccaggctagagtgcagtggtgcagtcttggctcactgcagcctctgcctcctggattcaagcgattcttttgcctcagccttccagatagctggaattacaggtgcatgccaccatgcccaactaatttttgtatttttggtagagacagtgtttcactgtgttggccaggctattctcgaactcctgacctcaagtcatcctcctgcctctgcctcccaaagtgctgggattacaggtgtgagccacagcacctggccagcattctctctaatgggactttgtaagttaaaattcttagttgaatacaagtgatcaactacatcaggttctaaatagtaggattttaaaaaaataatattttaacttatttttttaaactatagagacagggtttcgccatgttggccagactggtttcaaactcctggactcaaaccatccatccactttggcctcccaaagtgctgggattacaggcgtgagccaccgtacccagcctttagtagagatttatgaaatgtgaagtaaaacatttttcctttcctaattatcaaagattacaaagctcatgttgatgctgtagtaaaaacaagaatgtcttttggggaaggaatgaactgaggctgaggtttcatgccttgtgcaattattttagaaaagcttcttagaggagattggcttttttttttttttccttcttacagcgtattcctgttaatggcctttaagattggtaaaagcttggttatttttgttagaagacattaggtatctaaaataagtatgtggctgggcacggtggctcacgcctgtaatcctagcactttgggaggctgaggtcaggagtttgagacaagcctgggcaacatagtgagacctcatctctacaaaaatagtaaaaattaaccagttgtgatggccagtgcctgtagtcccagcgactcaggaggctgaggtggttggattgcttgagcctggaaggtcaaggctgcagtgagccatgattgtgccactgcactgtagcctgggcgacagagtgagaccctgtctcaaaaaataaaaaaaaaaattgtgttttcaattcattgggagctgaactagcatgccaaatataccttagtaattgttttatcacgataattatgataataaattttgttttacagaggcaacggttcagaatattcctttttagtatccatacagtgttaataatgactcattatagattcacattctagtcgtacatgtttcagtcacgtcttctttcttctttccaccttccagaaacttcactcatatatcagagtagtttcaaatctgtgtctccagtgcctatctacctcattaattttggtctttcattaaatcatactaaaacatgcttaatgttgcttgaatacctaacatgtttctgacacgtcctcctttattcttttatccagagtataattaatagacctaatgatgtttatttctagttagtggtctcatctcagaaagcatcaagtttctgtctgtatttataaaggttttatcctttaaatatgtaatgttgccgggcgcggtggctcacacctgtaatcctagcattttgggaggccaaggcgggcggatcatgaggtcaggagatcgagaccatcctggctaacacggtgaaaccccgtctctactaaaaatacagaaaattagtcaggcatggtggtgggcacctgtagtcccagctactcggcggggctgaggcaggagaatggcgtgaacccgggaggcagaacttgcagtgaccccagatcgcgccactgtactccagcctgggcgacagagctagactctgtctaaaaaaaaaaaaaaaatgtaatgttgctgtattatttcagtcccctttggacttctgcattgagactttttttttccttttttgcattgagactttgttttaaatattgcataaaatattttttggggtatattggaatatgaaaatttgcttttgaggtttgattacaaagtgaaaagtctgaggcatgtgtataccagcttttgttccagacatatttaagttgtgtgacaaaaaaggatacatagtaatgtgttctaactttatcatccctagagggagacctggccttacagggcagcattgggagtctgtctctaagtgacctcacatgccatggagagttctacagagaacggttcactaccagtggtgaagaagcactcatcttccagacttttaagtaaaaatgtcaatctttttctgacttgatattttatcataatacttgctgtttcagattcttgttggctagacaataaagaaaacttttaaaaatttttaccttcttagaggtgaaattgagaagttatggttatgaggagttcttcctgactttaaatttcattaaaatggatctgtgttgaagtgggctacttaaagcttcataaacagatggggtatgagttaggtgcggtgggtcatgcctgtaatctaagctctttgggaggccaaggcagatggattgcttaaagccaggagttcgagaccacccttggcaacatagacactgtctctatagaagaaaaaagccgtctgtgtgtggtggtatgcaactgtagttctagctacttgagaggctgaggtgggaggatcccttaatcccaggagttggaggctgcagtgagccatgactgtgctactgcactccagcctgggtgatggaggggggccttgtctcaacacacacacgcacacccaccccagatagggtatgattgaatatttctgattattaaaagccctgggctctcttgctggttttccacgaacttggtgtatgtcctgagacaagtcatgcagtcttcgtgcatcagtttttctatatattaaggggactgaatcattagaacatttctgagcttccatgtagctctaaaagttctggaatgatttcagcctcagaaggttgttgaggttatgagttcattatgcatttttgtttataaacatgatctatattgaattgtttctatgttagattttagaaagggatcttcaggcatggctggttattaaagaattattttctcagggctgggcgtggtggctcacgcctgtaatcccagcactctgggaggctgagggaggcagatcacctgaggtcaggagtttgagaccagcctggccaacatgatgaaaccccatctctaccaaaaatataaaaattagcggggtgtggtggcaggtacctgtaatcccagctagtcgggaggctgaggcaggagaatagcttgaacctgggggacggaggttgcagtgagccgggattgtgccactgcaccactccagcctgggtgacaagagcgaaactccatctcaaaaaaaaaaaaaaaaaaaaaaaagcttttctcagaaaatagggagtataaaatggtggttttcaacccttttttttttcttttttttaatctaagaggtattagaaaatatagatgtccaggtctgcctctacatattctgatttaattggtctagggccatgctcagtctcttttttttttttttttttttttgagacgaggtctcgctctgtcacccagactggagtgcagtagtgtgatctcagctcattgcaacctctacctcccaggctcaagcaattcttccacctcagccttctgtgtagctgggaccacaggcatgcaccatcacacccggctaattttttgtatttttgggagatagggtttcaccatgttgcccaggctggtctcaaactcctgaactcaggcagtctaccggcctcggcctcccaaagtgttgggattacaggcgtgagccaccgtgcctggccagtgtgtgtgttttttttaaaatgctgatgttcaaccaaggttgagaaaaactgtttcaagaagatatctgagggctttttcatttttagggggttatatggtaccctgctgagaatggatttgtttgtgttctataccttggtgtcatgaagtccgataattaatgtaaaattctcaatttcccgcctagcccaaaataagtactcagcaatgttggttgactgtgtcctatttaataatatttttatggcaccatgctccattaaactcagaacaatttgtagaagtcttctaatttatcttcgactatagattccagaactctttgacttacatttgactaagtaaaaagatgtctttctgcctctagaagacagtttttcctagaaacattgattctgatgcctaattttctttacccattaattcatggacttatttttattgtttttcacacatcctcacaatctttgccaggaacatggtgagcaggaatacttacctttcagggcagggagaaaggtcagagcctcaggtggcctctgagtgacctcagtgctagagctgtccacctgtttatactcctggctatcacacctttatcccatcacagaagcttacaaaaggagtaattattagagtttgctttgtaaagcctaattttggatttccatttaataattaaagctggttttagggaagcccctaaaccaacctgagttttcttgaaatactaacttgtgtcttgctgttatctgagtcacacttttatcctaatttttagatacggacggcctgaccctctgctccggagagaacacgacattcgcgtgagcctccggatggcctctgtgcagtatgtgcatactcagcgtttccaggcagaggtggtggccttcattcagcatttcactcagctgcaggatgtcttagggcgccagcgagctgctattgaggggcagacggtaggtagcctgggccctccaagctgcttttccagtttgactgatcagtagaacttttaggcctctagagatgaatctggaagagtaaaggtaagttatccttgctaatatgttctccgtgtagattagctacagacatctttgtgtaattgaagagctttgttccttatttattgtatctcacttaaattaccttcaaactttagctttcactttctgtaaaaaaagataagggaggtttacaaagaacacttaagacttctggtcccttttaggacttcagtggggatgtttctcttggaaagtggtaggttttttctaaatgcagtagatcagaagttctaaactgagttcgtggcccccgtggggtcctggtagtttattcatggcacatcctaggccaaaggaaacacctaatggtatttccgtttacaaagtaagtcagtctaaacaacaagtacatatgtcctaacaacttagtaggtgtttgaaaaaataataacacataaatggaaagaataatattttatttaattcttaagtaaccacaatgactggtaggaggtatgtgcctgttaggtattgcataacttctcaaacttggaatcaggttggacattacaaccctcacttcctgtccacatttatcttcttatggtacttgctttttctcacagcaaccgctgaagacccagcttcgcaaagataataccttactgaaaggagtatagaatgatctattattgaatgccaactaccacaagctactagttagtgcagtgtctggcagatgttgtttttccttcaaaaatttaaaatgtcctggcagccgggtgtggtggctcacgcctgtaaatcctagcactttgggaggccgaggcgggcagatcacgaggtccagagatcgagaccatcctggccaacatgacgaaaccccgtctttactaaaatacaaaaattagctgggcatggtggcacgtgcctgtagtcccagctattcgggaggctaaggcaggagaatcgcttgaacctgggaggcggaggttggagtgagccgaggtggcgccactgcactccagtctggcgacagagcgagactccgtctcaaaaaaaaaagtcctgacagctgcaagcctttgccaccctgtggtgtctcagtgcagtttgggaaccatagaaaataacaatgtacttttgtaacaacgtgttatttttccttttttaaaaaaactttatggccaggcgtggtggctcacacctgtaatcccagcactttggggggcgaggcgggcaaatcacttgagctcaggaattcgtgaccagcctgggcaacatggtggaattctgtctctacaagaaatacagaaattagccgggtgtggtgaggcatgtgtctgtagtcccaggtacttgggaggctgaggtgggaggatggcttgagcccaggaggtggaggttgcagtgagctgagatcatgccacctgcacttcagccttggtgacagagccaccatgactcaaaaaaaaaaaaaaaaaacaaaactttattaggtaaaagattataatttaataaatagatactttatagtggcagcatttttaaaaattacattttaatttaaataaaaaatgtttgacttggtagatattgatttggtacagtagcaaagtgaaaaagggcatttggagaaaagtctcctcaattatttttctccaactgtctagtttctctctctggaagcaacgagtgctgtcggtttcctgtgtatcttccagagaatgtatttttaaaaaatatacaagtagcataatcaaatgatagaaaatctggaaaaaagaatcatactagtatctctgcactatagcatgttttaatttgtttctgttgttttctatacatttttctctgaatttgctcatggaatatataacctttttttctttctttaacaactcaaaaaaaatttagcgttttacacctataaaagattatctgtagcatgtatatatgtcacagagtatcataataagatgaacatctgtgaacccacctctaactaaaaattaaagcatcaggaagacagctgcctgcatatgctgtgttccttccctattccgttcccctgtcaactcctcgtggaaccactctggtgatttttgggtctataagatcctttaaaattaaaaagaaaaaatttctaaacggtatcttttgctttgcttgtgatctttataaaaatggtattaaaccgtatttaatgttccttgacttgcttttccccccatttagtgtgttgataagattcattcatattgttacatacgatagcatttatttttaccattgcatttcattctgtgtataaatgatttatccattttcctttggaacacttgggctgtttacagtgtttagctcttatgtactgtgagtcctgatgcacatacttgagactttctctgatctctgagatacctggcagtggaattactgagccatagggtgtgcgcacatttctcttcactagataaagccagatcgttttccaaaacagctgtctcaatgatagtctcccatcagcagtgtataataatttcttttaattcatatctttgccaacactcttattgtcagactttttatttgatataaaatgatattacatttatggtctgcatatgcttttataaaataatttagattgagaaatagcatacagtgtatcaagtatgtaaaacactgtaattttatacatgcacttttagaatccagctatttttcctagccttttttagaatctttttccatcttgctttgcatttttcatagatatcctatgtagcaactatataatctattagtttaaccattttcctatttttaacatttaaattgctttcagcttttcattcttatgactaatgcttccatgaatatctttacagaagtgaagtttttttttcactttttgaattatgtttacagtattgattcctacaaatggtactgttttatcaaagttatgaacatttttgtgactttcagtatgactctgctaaatgttttctgttagaattgttgtgtgcatttaaaacagttatttttacatgtgtggttgaaacagtggtaagtcttatggtggtgaatcatttgggttaggaaacgagatacttgtatattactgagtaattgggtttaacttcctgggttaagcagagttgaacaataagtctcaagttttgctttatcaaattatataagacaagtaggaggttaaaggaatgtctttctattttgaacattgttcaatatgtaggctttgaagagaagctgatcttctcaagaatctttaattctagctgtttgaattaggtttatatagagctaagatctacttttatttgtcgataagattaagaggctattttgtttgaaatttaaatttctttcaccttgtattggtgacacgtgtttttgacatgtagctgggtttttattcctacattttctgaggtctgtaaataatgattcagtggaactttgaatttctttgtattcttaatgtttgaaattttaagagtatcagttataccagatgtgtttggccaaatataaattatttcccatatattttaccccagaagtatgatgcagtttttctatgccttccactttacatgtaacctcttatatttgttacacttcttcattcacctagcaactggtatagtaaagtaatgctgtgcgttagaaatcttgggacaaatatcttgagtgggttttgcttccattagctatgtgaccatcagggagttatttttcttactattcttcccttgactcagttatagtaggaatacggagatagcagaattaagtagcctgtacttttggcaataattatttatattaatgatgctttggagttttcaaagtgctttcctacacattatctcatttgatccttataacaaccctgtttgttcatttcttcagtaatttaggaatgagtgtgtcatgcagcttgccaggtgctaggaacagagtggaaaacaagaaagacaaggtcattgccttcatggagtttatatttcagtgggaggatataatcaaggaaaaaaagataattagttatgataatacctaatgaggcggtggtcggcagatgtgttactttcattttataagtgaggaaacattgttaactcttagccctggttgtctggctcatgattcagtgttttttccattaacatataactgaacgcatgttcaagatgtaagtgctagtcaggatgcctgtatatatataaatacatagctgtgtgtacaggaaaaaaagactgaaaagatatggtgttgatgtggtaataataatagctgttacattttcacctcagtttctgggtgtattgtctcatttaatccctatacctctttgaggtagggcttatggcttattattattcccattttatagataaggaaacggaggcacagagactttaacgacttaaccaagataaccaagctactaagtggccaggggtttattagttttatcttttaaaataaccaacttattcaggcctgtattatggccgaggcatactctcagccaatagaccacctgttcttataaagaggatatgttctgggctgggcacgctcacacctgtaatcccagcactttgggaggccaagacgggtggatcacatgaggccgggagtttgagaccagtctggccaacatggtgaaaccccatctctcctaaaaatacaaaaaatagctgggcgttgtggcacgtgcccgtaatcccagctactcgggaggctgaggcatgagaatctcacttgaggccaggaggtggagtttgtagtgagctgaaattgtgccactgtactccagcctgggcaacacagcaagactctgtctcaaaaaaaaaaaaaaagtatgttctgtggtttttgggtgcagtcatattctataaatgtttaattgatttttctctgattgtcggtttcctatatcattgacttatgctttttattttcttccttctacttcagatttaatttacttttctttttccagcttcttaaggtggaagctttcaattactgatttttaagtctttattgctttctaaagtcgtggtgtaaatttctctctaagcatagttttaagtgtatcccacaaattttaatgtattatgtcttccttatcattttagtgaaaatatttttctgtttcccttgtgatttcttctgacctaggggttatttagaagtgtgtagtttactttccaaatatttggggattttccattatcttcttgttactgacttccagtttaactccatggtggtcatagaatatgctctgtatgattttaattgttttataaactcacgaaacttttgggaacctgaggttatttggtggtaaaattagggaattaattatcctctgagtcagttttccttcctctttcaggtgagagatcaagcccagcgctgttcacgggttctcctggatattgaggctggtgctcccgttctcttgatcccagaaagttccagatcaaataatctgattgtagcaaatttggggaagttgaaagtcaaaaataagtttctgtttgctggttttcctggcaccttttccctacaagataaggtgagcaatcagtatccatttccttttccgttcagctagtatttgatcactaattgaaaaatttgtatgctgctgtaagatgatccataattgctattacttttgtagggtatgtggcttgaagaattttttttggcattttattgatatttcagttaaccttatgaattgaggtagtgtaaattataactcttagtaaatgtaggtagtagaattttttttgacattttattgatatttcaattaaccttatgaattgaggtagtgtaaattataactcttagtaaatgtaggtagtaacttgttttagcaaacaaaccaatggaatcaaccttccatctttttataatgctttctttatataaaagcattccttctataatataaacgttttagactctgtggcttttttcagaggacgtgattggcccgtggtttacttgaagccatttaaaaatgtcttaataataacatctgtacagtatattgctttacagttttaaattactgtggcacctttttttttttttcaacttttgttttagatacagggggtacatgtgcaggtttcttagatgggtatattgcacccagatagcatagtacccaataggtagttttccgacccattccccccaaccccccgactccgctctagtagttgatgttaaacaagtaaacgtgtttccctgagttttgtgagctctcttagcaaattatagaaccttaggagggtatctgttgttctcatatttatgaccatccatggatactcaatgtttagctcccacttacaaatgagaatgtgtggcatttgctttgcttttttttttttttttttgaaacagagtctcactctgttgccaaggctggagtgcagtggcactgtgttggctcactgtgacctccgtctcctgggtttaagcaattctcccgcctcagcctcccgattagctgagattacaggtaccaaccaccacacccagcgagtttttatgtttttagtagagacgaggtttcaccatgttggccaggttggtcttgaactcctgacctcaggttatccacccgccttggcctcccaaagtgctgagattacaggcatgagccaccatgcccggccacatttgcttttctgttcctgcattaattcgcttaggattatggcttccagctccatccatgttgctgcaaaggacatgatttcattcttttttatggctgtgacttatccatttctcataacagtgtttggaggtaattaggatgaggactgttgttatttgtgttttacattggggaaactaggattctttgagaataaacagtaaaaatggaaacacctagtaattcacagacccttaaagctgagaggaccttttagatggtccgattagtcccccttcatccatttttgcatttgaggagactgagtgacatttctggaaccagaaatgaggccttgtcattcttggtgtgtgttttcatcattccttgctggtttccacagcagctcttcagtctatttgcttattccttgcaaactcgttttagtgtgtcagaaaagcacttactgaaattcccagctacttatgcctatttttagtataatagctaataacgtagggagagagatggcctttgagatgtatgtaagatttgattgtaagatttaaaaactgccgaaaatagcaatacatagctgccatttgctgaatgcttattatacatcagccagtgctgtgctctttacatataaaaggaaacagctcccaatgcttctgacaccagatgtgttgggttttcccccatactaaccattttccgactgtgcagataccaacttgtctataatttaattatgacattaaccacttggagttagcttaagaccccacaggtccctaaagactgctccccactcagacaccagtcacaagtacaggtctcctgtatgtctgacagactagctataagcttggggttcccacaatgcctcctgaggttcagtaatttgctatagtggctcatagaactcaggggagcacatttactggttgagcataaaggctgtaataaaggatacagccagatgaagaggtgcatagggcgagaccccgcagcgtcccgaacacagaagcttttgtgccatggaattggggtgctccatctcctggactgcggatgtattcaccaacctgatatctctctggaccccattgtttaggcttttaatggagtccccattacatgggcataattaattaaatcattggccatttgtgattagactcaatctctagccccgctgctctccctggaggcctgggcactgaaactgaaagttccaaccctctaatcacacggttgcctgtacttccagcaacccccgttctaaagctatttaagggtttttagccaccagttatctcgttaacatacacaaggacattttatcactctggagattccaagggtcttggaaactcttgtgtcagggactaagaccaaatacagttatggtcccttagctacagggagatacttggaagaatgatgcatccttaggtgatttccttgctctgtgatcatcatagagtgtccttacaaaaccgaaatggcttagcttactgcacacctaggctctgtgctatagcctgttgctcctagaatacaagcctgtacagcacagtactgtgttgaatactgtaggcagttgtaacaccatggttaagtatttgtgtatctgaacatatctaaatatagaaaagatacaataaaaatgctgcattataatcttacgggagcatcatagtatatgtggtctgtggttgactgaaatggcattatgcggtgcacaactgtatttatttgtggtaaatctttactttgaggccatactaaaatttttaggaggaaatcagttctagccagattgtgtgaccaagttcaccaggaccatttttgtttctctatccttcctaaaaaggtactggccagagtttccttatcagatatatctatgtatgggtttaccagcaggccctgaagttagcctcggcagaagaattgccaagatactgaagacatttttgcaaaagggttcctattttttaagtcaaataatagcacagagtttgtagtgttttaatgaaaaaaatttccctgtatttgtttttgaggatttgattttaagtggcagtgcatacaaggagcgctttttcttcaaggtataatgtgctttttttgcaacctgactattctgaaaaaccttatgggattcagcagtcaatccacattcacatgctttaaaaagaaaattaaaaccaaccctttaaaatatctcattacttgagaaagcctgcttattaacttttttttttaagtgtttgaattactttcatactatgtaaagatgttgttcttaaggcccattgaaaagaattcctttttttttttttttttttagccttcactagtacgttcttggtgatcttattttatatccttaaatcttagaaaaactatcttactgggtaccagtgattgttctgtagaattccataagggctgtttggagtgtgttgcttgttcaagtatttgtaagcagataaacacatctgtgaagttcacctccccatgcatacagttaaatataattgattacagtctatatgaaatgaataattaccttcttcaccagccatcattttgtatttgcatttgcctttgaatacatttgcatgtgtgaggtttgtctaatatgcattccagtggttaaagaacaggaaataatcctgaaatcaaagcttggagacgggttatttgcccttgagttccaggactcctgtgtgtttggaattgttttacataaatccatgtcttaatgagtacaagattgagtttttttgcatatgcttttatttcacttttctcaaccatagcttatgcttaaaccacaatttctaagtcaaaatctttgaaaagctttgggttaatcttctcaagccactgatttatttaaaccaactacagagaggatgtagagatgaatcaaatgaaagggcaacaaacactttacagagtttaaataaactaagtgagagggaaaggttttaatgttgaaatacttaaataatgacatttacctagtaatctgccttgcaaaaaaataaaaaaattgcagaaagcaagaactagtttcttttacttgtaattactacttgagagaactgtgaaagggagcagtgtttttgtattcttttccaaagctgagaggagtcaacataaaggcagccctagagggagagccatccttcctctcttcccagattcggttgagaatggcaagatgggaaccatgatgctacgggagctgtgcagacatgtagctccgaggcctccatgaagaagccctgggaagcttaaaagtcaattattgaattgttctggtgaaatagattttcctctgttagcagttaaccgaatgaaggtactaagtgtgtaagaaaagagtagtattttcaatagaattactgaatcattttattctctgttagcccttcttaatttgtatgtccttgagcagaaacatcataggaatggctggcctcttttgttttcatttctacagttacttagatgggaaatgtaaacccatgaggggagacatctagaaggtacaaacacattggagccatgttgccattagatgtcttttcttaaaacaatatgcccctccccaaaagcaaagcaacaaactgtcatatagctgagagacttgcttttgccgcatttgaccttgattaaaccacttgaagcaattggcatcttcacatttgctcttgagccaaaagatggtatcttcctgcagaagttttcagcaagtattgaactatatgtaacatctctgctgataattttttgtggcagtaaatgtcgtgatcctggtagcctcttgtttatgggatctgggaggctgagggaagtataagtattatagagtctttgaagaccctagggactgggataggactttggagatattaaagatagagtcccaccaccagtgctgcccccttcccatttcctgcattctagttttattttgttccttcccaggaatctgtgccttcagcttccccaacgggtattcccaaacacagtctgaggaaaacgacaagcacggaggagcccaggggaacccattcccaggggcagttcacgatgcctcttgctggaatgagcctaggaagcctgaagagtgagtttgtgcccagtacctccaccaagcagcaagggccgcaacccacactgtctgttggccaagagtccagtagtccaggtaaaagaggagaaaagcaacataatactgaaggtggggaaattcacaggactgttgaggaaactgaggggggtgggcattgtgttcaagcaaatgttaacgaagagatagcatttctttaacgatgatgagattctgattttgctttacaaggtttaagagttttgggtgtagatttatcattggatgacttgtaaagtagggttaaattagcacgatatagtgtaattaaagagatttttagatagcctattaggacttttttcttataggtgaaaatagttgccaccagatagtgatagtataagtagaaagagtcctgcattctgcaagccactacccagacactgtccttgcaaaccactaagtctaaaaaatataaaagaacacattaaaaaatattagcgtaaattaggcaacaacagaaatgctgtagcacagagtttaaaagacatgaaccatctggttattggtgttcttctctccaatataagaattagtcattccaaatgagaacattattttggaggcttttctggttttatgtattttttttttcccctcaagacagggtctctcactgtctcccaggctagagtgcagtgttgtgatgatggcttactgcagcactgacctcctgagctcactcgatcctcccacctcagcctcctgagtagctgggactacaggcatgtgtcatcacgctcagctaatttttgtgtgtgtgtgtttgtgtgttttgtagagatggggttttgctatgttgctcaggctgggtcttaaactcccgagctcaagtgatcctcctgcctcagcctcccgaagtgctggggttacaggcatgagcccccgggcctggcctcttttctgttgttaaatgtgttctggatgagtcatgtgcccgataagtgggagctgctctgagctgctagagacggaggcagaatatgatgagctgcaaagatcagtccagtgtgatgagactttgcaagatgcaggacactagctgagagaggctgctgagtgtcttgttacatagatccgaggaattgttagctctctctggtaccttatagtcctagaggtgacaggaaagtggttttaattgtgttgatcatttaacaagataattttcatccccgtagtagtagttgtgaaacactatgtgccaaacattgtggtgcattatttacattaattattttgttcacattacactcctgcagggtttttatttttctatttttatttttatttttatttttatttttttgagatggagtctcactctgttgcccaggctggagtgcagtgatgcgatcttggctcactgcaagctccgcctcccgggttcacgccattctcctgcctcagcctcccgagtagctgggactacaggcgcccgccaccacgcctggctaattttttgtattttttagtagagatggggtttcaccgtgttagccaggatggtctcgatctcctgacctcgtgatccgccccgatttcacagatgaagaggcaaaggcttgcagagattgggtaacctgacctgcccaaggttatgaggtagtaatggaagagttggactacgaattttggcagtctgactccagaaccgaattgtaactgaacatgatactgcttgccagtctgtctgcatgcacatctagaacacagagggggctgcacctgagggccactcggcatatggtgcttgccgccactgatgttatgacgtctgtgatgattaggaacaaggccagtcttacatatgtattggtggatgcctttaagaagtgatttgggatgttttatagaaagaatgtctcttttttaacagtatatctcctactgatttgctatttgtttctgaaatttcactattaatgatacattgtcttggattaagacagtggttttcacactgtttccatgtaatcctaggattccatagcagtaccctagagcagcagtccccaacctttttggcatcagggaccagtttcatggaagacaatttttccacagacagggttggggatggtttcaggatgaaactgttccaccgcagatcatcaggcattagattctcataaggagcacacaatctagatccttctcttaggcaattcccaatagggtttgcaccccaatgaaaatctaatcccaccgctgatctgacagtaggcagagctcaggtggtaatgctcgctgacctcctactgtgagtacctgtctgtggcctggggatttgggacccctgccctggagaatctccaaagcctgcttcattcactttccttacccccttctagcagatcagctctacttttatctattccatgtatttatcaatgtaagtaactaataaaaaactaattttttcagtgcccacgtaatgccaggtgttatgatattttattccctagtatattaacatgctgttagacatggctcctcctacagtgctacttatagactaatgaaaaagacattgagcatttaaatattgatagattataataaatgttatcatggaaaagacagaagaagagagaagactgaatttagatgagaggggcgggccatgccacctgtaaggctgttgaggcagcaaagagcttggcattttgggggtaacaaaggacagtaagcctgaggcctagtgagcaggagagagaatggcttgaaatgagcttgggaaagaaggcagtgggcttgtgcagggccttgtagggatttgggggagttttacagaaataattttgtttcttttttgttttgagatggagtcttgttctgcccaggctggagtgcagtggcgtgatcttggctcactgcaacctctgcctcccgagttcaagccattctcctgcctcagcctcctgagtagcttggatttgggcgcccaacaccacccctggctaatttttatatttttagtagagactggtttcaccatgttggccaggctggtcttgaactcctgacctcaggtgatccacctgcctcagcctcccaaagtgctgggattacaggtgtgagccaccgctcccggcttacagaaagaattttggattaaccgtagccagtaagtgtataaaataagtgaatgttatggactgtttatttttttaaggattactcaggtatttggtggggagagtggttttgtgagggctagaatggaattatgtaggcctaatggaggagagttctttttggtctaggcaagaatgaaggtggtttggatctggtcagtggaaatggacgtggttacatgtggcagtatttgtttgaaaaaataattttagtgctggagaaagtttgtaaaccttttggtagcattgtgcgtggggagggattgcctatggagtcagatttcgtcatcaatcccccagcctcagttgttgtcacagcatgggcatgagacaccgtagaactgtgacgcggtctgtgcttggagtggaggcgggtgggcagggtgtgtcgagcacatggagctttgcataaggaggtctggctgccatagtggagactcctggacagccagttttctgagtagtggacagtgtggggaagcaggcagctgtaaacattttcaaagacagaatgagctttgcattttttatttgtttagtgcaacccctttttgggtccccttttcttcattacctctctttccttgggtccttgtagaagaccatgtctgcctgctggattgcgttgtcgtggatctccaggacatggacatctttgctgcagagagacatccgagagaatactcgaaggcaccagaggatagtagtggagatctgatcttcccttcctattttgtgcgacagacaggaggaagcctcttaaccgagccttgtaggctgaaattgcaggtggaaaggaatttggacaagtgagtgtttttttttttttttgagatggagtctcgctctgttcaccaggcagggtggagtgcagtggcgcaatcttggctcactgcaacctccacctctgaggttcaagtgattctcctcagcctcagcctcccaagtagctgggattacaggcacatgctaccatgcccggctaatttttgtatttttagtagagatggggttttaccatgttgtggtcttgaactcctgacctcaggtgttctgcctgcctcagcctcccaaagtgctgggattacaggcgtgagccaccatgcccagccaatgttttatatctgaataactgtctatgataagtagaatcttaacgtggaaatcagtgctattaagataagtttggaagaactagttattcacttatttcttcgtctatttaacaaatgtttattgagtccctactatgtgctgaacatgagggctactgtgatgaaagagaaaactaattcctttgaaggaacttatgttttgttgagggatacaggtagttaagcacatgattctaatttaatgtttgatttgatcttttttttctttttttttttttttttgagatggagtctcactctgtcaccaggctggagtatagtggcgagatctcagctcactgcaacctccacctcccgggttcaagcgattctccttcctcagcctcccaagtagctgagattacaggcgcatgccaccacacccagctaatttttgtgtttttagtagagatggggtttcaccatgttggccaggatggtctcgatctcttgacctcgtgatccacctgccttggcatgcccgccttggcatatggacatggtggctcatgcctgtaatcccagcactttgggaggtcgaggcggcagatcacaagttcaggagttcaagaccagcctggccaacatggtgaaaccccgtctctactaaaaaaaaaatacaaaaattagccaggcatggtggcgtgtgcctgtaatcccagctaccgggaaggctgaggcaggagaattgattataccagggaggtggaggttgcagtgagcctagattgagccgctgcacttcagcctgggtgacagagcaagactcagtctcaaaaaaaaaaaaaaaaagaaagaaagaaaaacaggtttattatttgtatagagcatgatttgaatctctttttggccactcccttcacagttcttggtttgggcaagtcatttaatgtcacttttttagtttctttctggattaatgatacaacttagctgttctcactgggatgtttgtgtttcagtcttacgtgttattcaagtgctccctggctggtgttcagttatggttggcatgggctatatttggttttactggctaagcagtcttaagaggagcttcgttatttagaaattgaacactttgttttcttttcaagcaatgctttccaaaaaacaaaaaaaaagctttcctattcagcttatctaaactttccccactcccatcagtgtttctgtgcagataattgtattctgttaggcctgatagaaggtgatgctgaatgcaaggtgtcctgtcagtctcacactgcacacacagcaacccgagatggcacttggtcagccgtctctgtttttctttgttattgcatcattgtcttttaaaactctgttgtatgtcggcttttctctgcagacaaaataacttttcttatatacctctgccatttcaaacactagccctctctatacttagagcatagtgtctgtaggattcacaatgcccagttcacccatgggaggttagagaaagctttttagtattgagatgaggtacagatgtgtgcccctccccctcttcaactttacttctgtccatcccagctgagatgacgaacctattcagagtttatcctcatgtcccatctgggctcagtatgaaacactggtgtttgcctttagttaccactaaatccaaagagttaaataaagatcttggcatcttttctttattgctttcccaagtgtaatatttaagctctttgtgagtctcatgaggttttccttattaatagattagttacctcatactaggtttaaggatttccctccctccatttcttgctccttccttccttccttccttccttccctccctccctccctccctccctccttccctccttccttccttccctccttccctccttccttccttccctccttccctccttccctccttccctccttccctccttccctccttccctccctctctccctctctccctcccacagggtctcactctgtcacacaggctggaatacagtggcacgatcacagcttactgcacccttgacttcctgggctcaagtgaacccccacctcagcctcctgagtagctgggaccacaagtgcacaccaccatgcccagttaatttttgcattttttgtagagatggggtttcactatgttgtccaggctggtctcgaactcctgggctcaagtgatcctcccacctcagcctcccaaagtgctgggattataggtgtgagccaccacacctggcctggtttgaggattttctaaatgtaaattttgggagaaaaggggctttttgtagttgaagcatgacagtcatattaacttgcttcatttggagctacatgaaatttttgtcattggaagtaggaattacctacttgataatgtaggtgagtacattttagccccgttgtttgggcgtgagctatgtcagtgttaagttagtgacttgtctgtgtaagtgatcttttttctttttcatagagaaataagtcatactgtgccagacatatctatccatggcaatctctcctcagtccactgctctctggatctgtataaatacaagctgatccgcggcttattagagaacaacctgggagaacccatagaggaatttatgcggccttatgatttacaagatccaagaattcatgtgagtgagaccttatgttcttctgtcactctcatagtctcagctgacggtcaccctgtgtatctattcctcaaactcacttggagaaagaaggtggagcaacaagcaaattagatttcttggcgtatgagcctgtttttaggatggcatcatcagctgtggattgacgagcattttccttttgtagactgtcctgagtggagaagtgtacacctgtatgtgcttcctcattgatatggtgaatgtaagtctggagcttaaagatccaaaaagaaaagaaggtgctgggtccctagccaggtatgcctttgattatattattatactgttagtaacagtatccaaataatacacatgttttgcattgacacagagcagaggttgcagagtggtggcccacagatggaatgttgtctgcagagtgtcttttggttgatctacacagtgcttttgaaaagtttagattcatgctctatcagtcaacataggttaggttatgctgtagtaacagacaaccccaaagtatcagtgacttaaaacagtgaagatctttttctccctcatactctgtgaccattgtgggtctgggctgctctgcttgttgtagtcgcttagggtgacagagcagctagtgttttgatgtgccagcgggaaaaatgagctctgaatggtgttgaatggcaactaaatgctctggcagactttgtggaactaaaatatggtcccacacagggtgatggagtcagaaagtcctgtcttgctgtgtgtctgagtagttacggggtgggagatgcagaaccacttgatgtgcagcattgatgccttgctggccaacattttcaaagttaggggctaggcgcagtggctcaggcctgtagtcccagcactttaggaagccaaggaaggaggattgcttgaggccaggaattccagactggcctgggcaacatagtgagagaccctgtctctacaaaaaattaaaaaactagctgcgcatggtggtgcatgcctgtagtcccagctactcaaggcgttaaggtgagagaatcacttgaaccaggagattgaggctgcagtgagccatgatcacaccactgcactccagcctaggtgacagctgaaacctggtccctcccgccccaaaaagttgcaggattttatataaaaggtttgtatttagcttcttttgaaaaactggaagctttggcaatactaggtccatgttctcacttggaagcatctggaagcggagtagcaattgctcccttgaaatggggcatatgcttacctagtccttcgcttatttctgtcacttccttagtcagtgtaaatgtatgaattcgtgattactggtgtggaactttaaaaagtgcatttcacacttaataaccttttcatgttgatctcttatcagtcctgtaagctgggcgtacatcactcttttccagatagagtttctgactagcttaaggtcgtatgactgggaaagtggtttggcatttgaaaacaggacttcaaggccagtgattccctgctgaagcactctgtcttctagttagtctttctgttgaaagtccgccacggtctgtacctaactcagctggtgagagcgttgcatactgaaactgtggtcccacattggtggtcttgtgagctagcaattttattctttccttttttttttttttttttttttttttaagacagaatctctctctgttgcccaggcgggactgcagtggtgccatctcggctcactgcaacctccacatccctggctcaagtgatcctcccacctcagccccaccgagtagctgggactacaggcatgagccacgtcacccagcgattttctgtgatgattggctgtgcccttagtttttctcaatatggaataattctgtatgtattgtcataatggtaccgagtaattatgaattcctcattgcagctttctcggttatgaaaaaacgatggttccaaatgcatttcctgttggtagattagttgaattattctccatgtgaagagtattatttgttcccagtacactacagcagtttcacataaacagttggacagaccctggagagtgaaacatccaggcaagctagaagctgacagatgaaggcccagagggacccttgacatcctttggggatatacagccttcttagacttctgatgggtcatgggaatgataacggattcagaatatgttaaacatgtggtattgttacttctcatgccgttcctatgaacaagatcatctctttggaactggaaaagtaagatccaaggcacagtgacactaactccattttgaggagtctattaacagaatcaacaagaaaactcagaatgaaagttattctccttatgggacttagatatatttttgattttgctcgttatctcgaacttatatacttttgtaaaatggaagagttgtgtttcacatcttgcttgctttcttttctctcttttagatttgacttcaagaaatgcaaactgctctatgaaagtttttccaaccaaaccaagtccattaacttggtttcccattccatgatggcttttgacacccgttatgctgggcagaagaccagccctggcatgacgaatgtgttcagctgtatctttcagcccgctaagaacagcagcaccacccaagggtccattcagattgaactacatttcaggtagcaggtccagacccttctctgcctttctttgtggagacattcccttttgggtcacgtctttgttggctttagaacatcaaaaaaccaaggaatcactagacagataaatagataatggcttaatcagtgcagtgtactgtatattaatgcattattcctataatcttgcagtttcatttattggccaaaagatgtctctgttgcctttaaaaataaagtagttaagaattgagccttaaaatcaatctccttgtaagctgtagactgttttaatttgtaaagtggcttggagaaggaagaaattatgctggtttaaggaaaaaagtaaaaagacttttggtctttacaaataatggaagggaaggtgggtttgacttgaattacccattcaagtcttactgactcattatccatgtatacatagtttttacctttttgaattaggttatatttttctttctggtattatgggaggcagtgttctatatagaaagaacatatattttggaatcagacagatctgggctgaaaaccttgctctcctattatctagctatgtgtccttagacaagttgtttagcccctttgagcctcaacttcctcttatataaaatagaaaattacctatacccacctcatggggtagaggtaataattaaagtaattctggcatattgcttggcacagttggcagctgtcattgttatgctgatataacatgttgttttatgatataccatttgctgatgttatggctgaacatagaccttaaaactgaaaaattaggcctggtctaaagaagtctttcagtgaaaacccaaaaaggagaccctcccttctgttagtgcttcatgtcatcagacatgttgtaagtataaaccactaagtaaaaagattgtgaaaaactttgtgtttaagcaaaaaacagaacaaaaagtcatcaggattattcttacatgtttctgtatgcctgacatttcaatgtgctgttcagaattccccagggtttaggttttgttttgtttttcgagagaggtcatgatttcttcatatgcctttaggaaatctagcagagtagacatttacatttttttatgaactttaaaagttcaggagtaggaatcctaattgcctcttattgggccctgccatgagccaggcactttagctacgctcagtataatcctgacaagtctgcagaggggatgacttcttcctcattttgcagtttccaagttagaaacttggataagggttagttcactcttctaaggtcacacagctcgtaggtcaagaaatcagagctcaaacctgggtatgtgatgttaaagcccatgatgtttccaacagtctttggacctatcaggtgtctcgtcattgggctgattgcagtcatgtgataagatggccccattttgcagttcatttggttgaagatgtttcctttgaacaagaggctggcatctgtttgttccatctggagaaacatttcttttttttttttgagacgtagtctcactctgtcgcctaggctggagtgcagtggcacgatctcagctcactgcaacctccgcctcccgggttcaagtgattctcctgtctcagcctcctgagtagctgggactacaggctcctgccaccatggctggctaatttttgtatttttagtagaaacggggtttcaccatattggccaggctggtctcaaactcctgaccttgtgatctgcccgcctcagcctcccaaagtgctgggattacaggtgtgagccaccgtgcccggccgagaaacatttctttttgagtttactttattattattgatctggcttcttagactgtcaggtagttgtctccttcttatcatatttttaatatacagggagcctggaaatatttgtgtattataggtgtataattggagtcaaataataaagccttaccttggctcttgctaacagaaatactattgttagcaagaggagtgaaatgttctttagatgggaatttttgaacgcctttcgtgtctgaagaagaattactcttctgttgggatcttgtgtgtcaaatataaatcacttcacagtgtttaaaggcttgaaatattttccagaaaagggatccaacacactgtgactttccagttaaatacagaactctgacaatctatgttcaaaatggggtggaaaaattttactgagggcaacattttttctccattacacaagagtagagtgtttctgtgaaaaatgctgtgtctgtaagaaggagccatgcatcatgctgcccttttactagaggcagtgagccaggtttaggggaaatgaggagcagagaaaccagcctcagaaatatttccaagttagcttttcccacataggaataccttttatgtcagggaaccaggtacatgtagtagctacaaccccagagtcgcttttgggcttacggaaccaagttcaacccagaaaaccgcattcaagtgctccagcccctgtttctcttgtcctactcatctgaggccttatccattagtaggctgggcctgctgatgtactaatagggcctggatgaagcccctgactgcatcatggtttgaagtcaggcctgagagtcctcgctgggttttcacgtcaaatgtagacttcggagcaatggcaacttgtccccccacccccaccccaactctacctctaggttacttaggggacatttatccctggtaaatgtcatcttacttgttctcctcgggccaaaagatctgggctgtcaggtcagtttcaattagagaaacaatctagtactagtgtgtgtaaacttggtattatttataaagaaatgatcctagacgtcaaagaaggagtgcctcattgatcttcttgaaatagcccatagggaaagaaagtgacatttatcaaatgactgctttgtgcctggtgctttatttcttatcatattaatattcttcattttataagtagggaaacaggctgagagaaggtaggtggctttcgtaagataacacagctcgtaaatggcagtatttaagtctgcgtctctgacttcaaagcctgtgctctttatcataccagaatttcttgaccttagcactatcaacgttttgggtcagataattccttattatggggctgtcctgtacatcgtgggttagttaacagcatccctggcctctacctatactagatagcaatagcaaccccctctagttgcaattgcaattgaaatgtgaataaaaaatgtctccaagggccaggtgcagtggcccacatctgtaatcctagcactttgggaggctgaggcgggaggatcacttgatcccaggagtttgaagttacagtgagctgtgatcgtgccactgcattccagtctgggcaacagagtgtgaccctgtctcttaaaaaaaaaagaaaagaaataatgtcttcaggggagcaaaaccatctgattgagaaccactgagctatactacctatgctgctttcttataaaatgttccttgttgtttaaaaatatgattaacttattatactgaatgtgttattaaaccagtaatacactgaatgtgttattcaaccagtgttcaaagtttactgatactcaaagcaggcagtttggaaaataccggaataccacctgccaaaactgagcagtacatttgcaggttattgaaataaccatgtttcttttttcctatttattttctcctgtcttctttttatagatctaccaaggattcctcctgctttacagtagttctcaacaatctccgtgtgtttctcatatttgactggctactgttagtccatgattttctccacactcccagtgatattaagaaacaaaatcatgttactccttctcgccaccgtaactctagcagcgaatctgctatagttcccaaaactgtgaagagtggagtagttaccaagcggtcttcccttcctgtgtccaatgaaaggcacctggaggtcaaggtcaatgtaacaggtgattatatgtgggtgtgattcattggtgcttagtttggatgttaggctcaatatctgccttacaggatgattgctcttttgcctcccatttttcacgtgagcacttacacatttgcctcttttacagacctgcaagcatcagaggtcttggcctccattttcaggtgggagctgtctggcccactgaagactgcggggtcgcttgtccctgtcccctgcctgcctagtgcttgtgtctggcccgagcacccgcctgggcagtggtctttttttttccagtgtacagtctgtctgtaatttgccgtttgatctttagggccctaacagatgtggtttatggagtttaggcaagtttcgtatgtgaaaacctcagttttgaagataagtaagtgaggagatttttattttcattacaaaaagaatatttttctttgtatagatgaatttactatggcatttgttgactagcgaactcatctagtgcatctgtatgtatttgtgtatttattgttatgtttctgatacctgtacctgcttctcagtgattttgatgaagctggctagcacaatgcgttttacatgagttcagttacaagcttgatctgtatatggtttttgataaaaacacagtttaaagcagagtgaatttactattaaatatatacacataagttgaaaacttactgatttcaaaaatctcgatattaaattggtctgttctttgtaaacaaccttgtaaatagctacttagatgcatagtgcctgaccagcattagtagctgagtcttctccctggaattttcagtcaggtcatcacttagagaaaggatgattttgtgaacttctgaatatctcctaggcctcccaggagaactggggtgcagtttctctgtctagtttagaaatattctaaagagagaaatcacatcccagtctttcctgctgctgcagagctctgttggttcagctgcatgtggccagatgcagagtattggttcaggatgacactgttagtaaatgtcagcagacattttggagaaaaatcttactggttcatgttgttgcctggtggaaatgcgctcgctgccttgtttgcaacagcctggtgttttccagcttcccagctctggcttgattgacgacgttgtcctttccaggtacggagtttgtggtcattgaagatgtgtcctgcttcgacaccaatgccattattctgaaaggcaccacagtgctcacctataagccccggtttgttgatcgccccttttcaggaagtttgtttggcattgaggtaagaagtctatgtgttgatcacagcactgcgtgttggctcacgagcaaagcatctggaagagaattttccctcttaaactttcatgaggggaaggaattaatgaaattggaagacccttgccctcttttcctctttgttttctccccaaatctacctggctattctaatgcatggattcagtctcccagtgttagtctataaatatgcagaggacatttgcctctttctcttacaccctttcttcctcaagaagttcaaggagacttttccagtccccactgccctgtcaggcaccttgttgtgccctctcgttctgcagacctcgtccatgaaggtgaggccgtgggtctcatttcccctgcatccctctcctcacctggagtgcagccctgtgaagagctagggctttgggaagggaaacctatttatacagagtgctaaggatcttatatgttatcctttcaggaatacctgatccataaaagggcagctctgcagagtcctgcctggctgaaaggagcgcatggataatagtggtgctttaggctctcatgtcatctcatgaagaagataatttgtgttggagtggcctttgtagctcggaaatgtcattatgcaatattaggccaaaagtgctttgtctcttgttaagccatggggtgtggagacagaaggggaatcgtggcaggttcttgtttctatcagatgtttgtacttgactcatctcagctcacattccccatgccacactgttaggatatttggtcggggttccttttgctttacgatcggccttttcatgcccctttctttccagtggtattgctcaaagtttgaaggaataaaacttattttcactgttaggagtatatggtttatggttttgagacaaacatagtggaataaagcctgtagggactctacttcttgaccacttgtttctgtcttgtaaagaaacctccgtttgagaggaaggatttgcatgctggtgtgatgtgagttgatcatgaaattgcaattcatctgccttccaagccaccacaatactagctttgaatggagaatcttgctgattgattaatgaactgtcaggtacaattgggttttgtgtagcagaaacccctgaaggaaaaaggaaaatgaaactgttctgctctgaagtcttaggacaactacatggcaaaatatttgagatcgctggaaactcctttcagtcctgcctttgaggcagcacaattggatctgaattttaagaccagcttgataaatcatcaggggagaatttataaagtatgaattttgaatatggcaaaggaccttgctgtcacatgtttttcacagcactaggataggtcccaaaaaggtggtggagggggtgaagagggtaagaaggacccaaatgattggtcttttctttccgctgtgctcttcctgagcatgcaaaataatttggtcctagaactggagtcctttctctctctctcccttctttctctctcccaatgaatgtatttattttttaaccttttattatagaacatttcaaacatatacaaagtaaacagaataatataatgaactccatatatacctatcacccagttttaataatatgtttatttttaattatgaagatattgtgaggagggaaaataatcatatatgatttctgataggttattttggtgtgtttctttccttaaagttggggagtaacattattttgggttgtgttttcactttgtgttgtaactgtcttcttaaaatccatatggtcttttttgtcatttttaaatggctgcaaatattccattgagtagatgtgatataaccttggctgctcttaattttttttaactattaaataatggtttagtgaatttttttcttttttggctagttcctagagagaagtaggattactggatcaaagggtgtgagatttgtaaggctttcggggtgtattgctaaactgccttttcctctgggtgaaccactgcgtgtgctctcggcagcggtggggggcttcactcttcacagtatttatttcagcagttgttatgggtcttatgataacacatggctgactgcttctgagatagcctctttgtgctggtagttggacccttcctaaatcagacattaattctcgccatattgcatttcattctgtaggtgttttcatgccgactagggaatgagcatgatacagctctttcaattgtggatcccgtacaaattcaaatggagttggtggggaattcttcttatcaaaatagttcaggattgatggatgcattcaatagtgaagatttcccacctgtcctggaggtaatgatgcaaaatctgtgcaatacgttgatatgctctcaaacactgtcctatgcaggcactcttatttgctctgagcccaacaacctctttttttgttttgttttgttttgttttttgagatggagtcttgctctgtcgcccaggctggagtgcagtggtgcgatctcggctcactgcaagctccacctcctgggttcacgtcattctcctgcctcagcctcctgagtagctgggactacaggggcctgccaccgtgcccggctaattttttgtattttttagtagagacagggttttaccgtgttagccaggatggtctcgatctcctcacctcgtgatccgcccgctacatggtgcagttttgtgaccatttgacctcatagttgagacatcttaccttacggttattagtgcttactttcaagatctttgcaatcttttaaatgagaaatttggtgcagtatctgttggacttttagaagttgaaataggaattacatctgtaagagatatggatgtaaaaccaatgcagctttaaaaaattgctaccttttttacattttgttagattcagttacaagccctggatatcagactctcctataatgatgttcagctgtttcttgccattgcaaaatccatcccagagcaagctaatgctgcagtgccagactcagtggccctggagtcagactccgttggcacttaccttccaggtgcatctcgcgttggagaggaaatcagagaagggacaagacacaccttagatcctgtcttgggtaggtgtttaactataaaacccactcagtcttgctaataacgcttcttctttttgactcttaaaattttcttttgcacaactaaattgtacacagtttaattgtatgtcattaagtataactgtaagtcctaagtatgactctctcattttttaaaatttaaaaacaaacaaaacatccctaaccaactactccactatttttcctctttcagttttttccagagttacctggataatgccaaagttgagttttaagctttgagagttctcctctgaaattatatgagtaacactaagttttatttttaagcttttattattaatttattggtttatttttagacagggtcttgctctgtcacccaggttggagagcagtggtgtgatcatagcttattgcagcctcaaactcctgggcccaagctatcttcactcctcagcctcctgagtagctgggagggactataggtgtgtgccatcatgcctcactaatttttaccttttttttttagagacggggtcttgctattttgcccaggctggtcttgagttcctggtctcgagtagtccccctgccttagcctcccaaagtattgggattactggtgtgagccactactgtgcccacctctaattttaagctgtttcaaacacagtcaggggaaaatgtaggggccagatggtggaatgaaggggccagatgcgaaatagaccttccccccccaccccaattcctggccaggacaccactttaaaaacacagtcaatatgaggaagagactcaaagatttcagggtacacttgatagaattctccaattaggagtccagttttgcttagagaaatgaaatgttttagtcacgggtttttaaatttcttttctttttttctaaaattagtttgtagattaatttacataaaattatttatgaaaattttatgctatttgtttcctagagttacagctggctaggctgcaggagctgggattcagcatggatgattgtcgcaaagctcttttggcgtgtcaaggtaatttgaacagggttctgttacccgttgtttatcttgatgatatgcttccttcccatttcctctcttacttccacaaggtgacttagagagctgagtgtgtttggaggacgctttatgtgtcttctctggactgcatatcatcttaggtcagtaataataacgtcacccaggctggagtgcagtggcgccacctcagctcactgcaacctccacctccccagttcaagccattcttctgcctcagcctcctgagtacctgggtttataggcatgcgtcaccacacctaggtaatttttgtatttttagtagaggtggggtttcaccatgttggccagactggtctcgaactcctgacttcaagtgatctgcccgctttggcctcccaaaatgccgggatgacaggcagcagtctttagtagtggataagaatttgggttctgaggccaggtgcggtggctcatgcctataatcccaacactctgggagcagaggcagatggatcgcctgaggtcaggagttcaagaccagcctgaccaacatggcgaaaccgcatctctactaaaaatacaaaattagctggcgtggtggctcatgcctgtaatccagctactcaggaggctgaggcaggagaatcgattgaacctgggaggcggaggttgcagtgagccaagatcatgcccctgcactacagcctaggcaacagagcgagactctgtctcaaaaaaaaaggggctctggagctggctgactgggttcagatccttactgtctgccactacctattaatgactttgggaagtggctttaacctctgtgaaccagtgcttccttatctgtagaaagaagataagaggctgtctccctcagagatttgatgtaagtaaatgactatatgcaaagcactaagaaagtgctagcacacagcaagtgctctataaatgttaaccactgttactagtggttgtgctaatggcggtgatattgataattatgaccatttattgaagtcctgtatgcctatctttgtgttttctttttgcatcctcttcacagcccttggaggcagacattattattcccacttgaaatgaggaaaccagctcagattggttaggtaaaacttcttaagtaaacttggtggaggtcacatcttagtcccctacgatggacttaaagccaggtctacctgcctcctaaatctgtgttctttctactccatctcacttcctttccatctccatgtttccctttctcttcaaaaagagaagtacagcacaggctgcatttccttccatcttttttttcccccttttttaaaagacagggtgtcactctgttgcccaggctggaatgcaatcatagctgtggcgcaatcatagctcactgcagcctccaactcctgggctcaagcaatcctcctgcctcagcctcctttccagtctttacacttgtgtgcactttctctctttctacttctctttttttttttctttgagacagagtctcgctctcttgcccaggctggagtgcagtggcgcgatcttggcccactgcaacctccgcctcccaggttcaagtgatactcctgcctcagccttctgagtagctgggattacaggtgcccgccaccatgcccagctaatttttgtatttttagtagagacagggtttcccttttttgtacaggctggtattgaactcctgacctcgtgatccacctgccttggcctcccaaagtgctgagattacaggcgtgagccactgtacccggcctctttctacttctctacctactgtggacagtatatccaacacacacacatgcacacattacatttttaatgtactggtagattctgttgccaatacaattttatagtcttttaaaaatattttattgaattatgattgtaattctgttatgatatacttaatatatcagcagcatcttcccatgtcattgaaattatttatcaatactgatctttttacattgactctaaggatatattataatttacttaatcattctttacttgttattcaatattatacacacttctatgtagtaaacattttttggtgtgaacttttgtctatgtcttttaagtatatccttggtagagtgatctatattttaaataccagaccaaagggtatagatatatttttcaggctctttacttgatttctttttttttttttaatttttcttttttaaaattttttttggggctcttgaatcgacaaatctttttctaaaaaaattgtatctgggttattccagccaatttatgtgtgaaaaggcttgtttcatgacatactggtttacattaacttaccttttggattctgaaaaaaatgaaggtagacctagttctcatgtgttcttggttttgttttacccagtcattagtttttggtttaattaattttataccccttaatgtttacttttcctatgctttttactctttctttaacaattcgagcacctttttttttttttttaattaaagttctgagaaccttttggatttttttttttttttttttttaattttagatactgggttttgctctgttacccaggctggagtgtagtggtggcacaatgatcatggctcactctagcctcaaactcctaggctcaaatgatcctcccacctaagcctcctgagtagctgggactacaggatgcaccaccatacgtggctaatttttaaattttttgtagagacaggtcttgctatgttgcccaggctggtctcaaattcctgacctaaagtgatcccttgcctaaacctcccaaagcattgggcttataagcattagccactgtgctcggcctctgtttggtaattttttttttttttgaggcagagttttgctcttgttgcccaagctggagtgcagtggtgcaatcttggctccctgcaacctccgcctcccaggtgcaagcgattctcctgtctcagcctcccaagtatctgggattacaggcacatgccaccacgcccagctaatttttgttatttttagtagaggcggggtttcaccatgttggtcaggatggtctcgatctcctgacctcatgatctgtccgccttggcctcccaaagtgctgggattacaggtgtgagccactgcacccgaccagtaatttttatttcttcagtagataaaacttaattccatcagtaattaatatgataatagcaactgatgtgtatctgtaatgtagataatagcaaataatgtttattacactccaggcttcactctgagaactttccatgtactcattcttccctcttcctgtcagtccttttaagtgggtgctgtcgggcacaaagagatcaaataacttgcccaagagccagcagctggtaagggcagaacaggacctgaagccaggccatcttgctctggagcccatgccctcgatcatttacactgtccctggtactggcctctggtgacttaggtaccaagtggcgccgtgtctggatcctctcctgtcctcttctctcctctccttcaacagatggcatggtagagagggatggcttcctggaggcattttgggccagatcgtgaaaggtgtggtaaatttgagtggaaggtgtgcaacaaaatgtttgcttaaaagcaggatgattattatgctgagattccctcccaccccccacccccaccacccccaccctccttttttattaagtccaagaatacttctgggatcaaggctctcttggcttcccagtaggtctctagagaattttatttctctgtttcctctgtgagtggctagggtagctgtggaagctggtagaactgatcacttcttaatttctttgaaggccaattgaaaaaggcagcaagttggttgtttaagaatgcggaacctctgaagtctctttccttggcctccaccagccgagatagcccaggggctgtggcagcgccattgatctctggcgtggagatcaaagctgagagtgtgtgcatctgtttcatcgatgactgcatggattgtgatgttcctctcgctgaactcaccttttcccgtgagtgttgtactggttttcagattcatcttgaatatttccagtcattgctgaattatttggggcctttttttttttgtcattcatactctatttagtcatttgggtgaaatttagataatagttttacatatgtttttcattatgtatgttttaaagaaacttttatttgccatatgtggccttcagcctatagcttgggaataggaatggtctttgataaaatttccattgtattaacatctctagctaaataattcctgatctcttcatttttcttatctttttatgtatctaaagattgtagtgaatactgctaggcatttaacagataagctcagacaataatggttctgttgtattatctcttgaaaatcaaaaacaagaatcttactagaaagtgcacttctgagtctccaccacagggccttgtaaggggtaaaacactgtttatatgtgagctgtcctttgctagagtggggaccaaagtaggagtactctatccttttttttttttttttttacctcaaaggtgaggtcttgttttgttgcccaaggttggtctcaaacgcatgggctcaagcagttctcctgcttcccgagtggctaggattaaagtggcccaccatcacttctggtgggagtacttgatccttaagtgcctcactgcaagcagtgtgaagttgaggtcttttttttttatgagacggagtttcgctcttgttgcccaggctggagtgcagtggtgcaatctcggctcaccacaatctctgcctcctgggttcaagcgattcttctgcttcagtcccccgagtagccgggattacaggcatgtgccaccatgcctggctaattttgtatttttagtagagacagggtttctccatgttggtcaggcctgtctcgacctcctgacctcagggatctgcccgcctcagcctcccaaagtgctgggattacaggcatgagccaccgcgcctggcgaggttgaggttttgaggagagtaaatgaaaatctccctactctgtttagttttaactttccattgtttcgatcttgccagcctcttcttccttcaggtaaagtttgcttctggggcttgaatctggcctcttgcacattacagagcttgccctttccctgagcttctatctagggcaccaccagggctacttggttaaaagtgacaactggaattttgactgttttgatgaatatcttttctgcagagactaattagttgatttcttatttttctatgtcaatcttaacattttgagctaatatttatcagaacatgacttctctaatcagtctgccctcttatcatttttcaggtagaaatatcttttttttattttttatctttattttttgagacaagagtcttgctttgttgccgggctggagtgcagtggcgctatcttggctcactgcaacctccgcctcccgggtccaagcaattctcctgcctcagcctcccaaataactgggattacaggcgcccgctaccacgcccagccagtttttgtatttgtagtagaaatggggtttcaccatgttggccaggatggtctcaatctcctgacctcatgatccacccaccttggcctctcaaagtgctgggatttacaggcatgagccaccgtacctggccagaaatatcttttatgttcccacaggcttcaggtacacctgggtgccagggctggcactgtgggaaggcaaatgaggtacttgcctcaggcacagagtttaagagggtgccagaaaactcagtcatggagataaataatatctcagtgccatatttttaaaaattgatgcaaaaaagtacatgatgaacaaagtatcagaatgttgtgtgctctcctttgcgagtattagctctaatgtttctttaatgtcatcagcaaaaggcagttttggttgctcctgccctgccgctgcagtaaggtttgctttcattgcaggtctgaattttcttcagcgtgtaagaactagccctgaaggctatgcccacttcaccctttctggagattattataaccgtgctctttcaggtcagtataaagcatatgttatcatgggatttaaaaaataaatttaaatgtttgcctggacctattgctacgtaaattttacatgaaggaaagggcaggggtggggtgggacggggaaagatgaaaagcaagtagactgcataaacacagaaaataaggattttctgttgtgctaaaaacatatctgatatgttgcaactaaaaagatgtttttggctggacgtggtggctcacgcctgtaatcccagcactttgggaggctgaggagggcggatcaccctgaggtcaggagttcgagaccagcctggccaatgtggcgaaaccctgtctctactaaaaatacaaaactagctgggcatggtggtgggcgcctgtagtcccagctacttgggaggctgaggcaggagaatcacttgaacccggcaggcggaggttgcagtgagctgagatcacaccactgcactccagcctgcatgacagagcaaggctctgtctcaaaaaaaatttaaaaagtgatgtttttatagttaattttttttggatcctgcagtttggctcattctagaatatgccattgctcaatagtgaaggatcatttatttcgccctgagagtagctaaatttcaagggagatttatgcccacaagcatttttttgtttgttttttgagaccgagtctcactctgtcacccaggctggagtgcagtggcacgatctcggctcactgcaacttctgcctccaagttcaagtgattcccctgcctcagcctcccgagtagctgggattacaggcgcttgccaccatgcccagctaattttttgtatttttagtagagatggggtttcaccagactggccaggctggtctcgaactcctgacctcaggtgatccacctgcctcagcctcccaaagtggtgggattacaggcgtgagccactgcgcccagccaagcattttaaacctcaagtcccttcactccccactgggtttgtttgttttattagaatctactgagtcagtgacactatatattctgccctacctgctccctagaaaaaacaaaaacaaacaaacgaaaaaccactgctgatcagagcaggctattttttgggagacgtaaacctcaataatatcgcaagcattttcaggtttctttcttcccatttgaaagaccaaggtaagagcctatacatacaggttgaaattcagaagccataatatattagggccaagtggtttgagcagtgaactttgccttaagagagctgaaagaaggtctcatcggaattggtagtaggcatggacagaataatcagagtagtgctgggcagtccaaggtgtaaacctccgacggcctgctccctttaatttcagtaagaaattaaacctcgatttgttgtgctgctgctgagtgttctagagtatttatcacatttaattttatgttagttaacattttccctgtgtaccagactcacttaaagctaacacccttatttcttcattgttcaaaatgtttcactttagaatgtaatcccagcgctttgggaggccgaggtgggcggatcatcaggtcaggagattgagatcatgctggctaacatgatgaaaccccatctctactaaaaaaaaaatacaaaaaattagccgggcgtggtggtgggcacctgtagtcccagctactcgggaggctgaggcaggagaacggtgtgaacccaggaggtggagattacagtgagccaagatcgtgccactgcactccagcctaggcgacagagcgagactctgtcttaaaaaaaaaaaaaaaaaaaaaaaagaataatggcccaagtctttctagttgagagaaactcttgcatgtgggagctatttttctgagaatcatttgttttcttaggccaaatattgcttacttttaaagttgtatgaacacattcaggtcactaaatgtcaaatggtgtaaggagtctaatgtatctactgtgtgttacatactgatttggatttgttcagtggctgattgtgtgagtctatttaaagatctgttaaaaattaattggctttgaaaagttgagtcttttaagtcacagtgatgtaccatttttcacacccaagagattagcaaaaattaagtgggacactactaattattggaacatataagccatagtacttgctattagaactatacattactaccactactgtgtaaaacaatttggcatgacctggtaaatttgagtgtaagcatactcaacaaccccgcaatgtgttgcttctaggtctgtaccgtagagactgtcttgcctgtgtgaactacagatgtatataaggctgcttatagtatagtattccaatagcaataaaactggaatcaagtgaatgtctttcagaagtagaatggataaataaattgtatattcattataatgcatgttaatattcagtagtgaaaacaatgtaccacggtgacctgcgtcaatgtgatgtagcagtatgctcaacagtatgctcaaagacatattggtgaacaagaatagaaacttgaaaaagaatgcgcatggggattccatttatgtaaagatcacaagcaggacagtctaaatgttcttaagaaaggtatatatgcttggtaaaattataaagaagagcaaggaaatgattaactaaaaattcaagtgaatggtcacctggagttgggtgggagagggttggtgggaaggaggggaatgagatggtagggaatggcccttgggaacttgtaattttctatttcttaagttgaatagtgagtacacgagtgttagtggtattattttatatgttgtttatatagtttttgtgcatattttaagaaaaagaaaaagtgagccttcatatgtacctatttattcaaccaatgtattggtcctgtaaccaggagaatcaaatttaatagctatttaagacactttattatttttccaatcttagtctgagactcctttttccatcttgagtgtctcaacacatcccacctgttctttagtggaagagggcacatacactgcctgccctccttcctgccacctctggaagaccatcgtgggggtacatatatgcctttccacttgtgtcttctggacaacgcagacatctgtagggtgacctgtagctaaaggtggttggtgcttttgttgtgaaattgaattggaagtagaaagctattaagctcgagtttgtccttgctgaacatttgcgagcagtgttcccctataaactcttgatatctgctgaacagatgtcttatttcctgtgttcttttaggctgggagccatttattgagccttggccatgctctgtatcctggcaacagcaggcagctagtcgtctccatcctcctcgactgaagctagaagccaaggccaaacctcgtttggatatcaatatcacttctgtgctaattggtgagtagaaagttgtctttcatagactgatacctttccgtacctaagttctgagtctggaagactattaatcctggtttagcaaatacctgggcctgtaccaggcatcacttcttcatcctgactgctttcctgatcaaccctaatagcctcttgattctcaacctgtttctccaccgttggcatcccataatgatgctatcagtggttaagcaagaacttagattacttaggaaacgtaaatggccgtgatggactttctcctcataatgcttggtcactagagtttattaaatgtcctggaagtgagtttagattaactttgctcaagctattcacggactaattcttaaaaggtgtgattttgaccatatctttatagtagaataagttgcctttgttgtttcccattatcattttgacctaactctgaaaatgacttgcttaagggttgccaggttagtggtgtgttatctaaaagtatctttggcaacactgaaatgtacatctctggattcaatgtcatgaataaaaactgctctattgttacagttctgccatctaaaaggaaagcaatataatcatacaatcaagtagtgtgtaccttcactgtgaaaactcacattcattgtttgatttattgatctacttgatctgattttggaattactatactttatctttgagcgataacacatactattgcaaattgtgaacttcctttggtgtgtatgttggattgaggctgttagaatatccacttccttacgcatgtcagagttggatggaaagaatgtattgtgaaatgagaccataagtttgttgaccccccaaatttaaaaccactgtttatatgatcagatttcatccactaatttgcctagttgttaatatcacctagataatagtaagttgaccctgtgatttctctaaactgtattgttttgactcctacattgtttctcacaacatctcttactcacaacatctcttactctagaaggttagagaaagtttgtggtagtcttttgaaaagctgcagtaaacaagagcttacctaaaggttcttattggtgtttctgatgagtacagtatatgtctctttaagaatatcttctggccgtgcacattggctcatgcctgttaacccagttcttcgagaagccaagatgggaagctcatttgaggccagaagttccagaccagcctaggcaaaattgtgagaccttgtctctacaaaaataaacaattagctgggcatagtggcgtgtgcctgtagtcccagctactcaggaggctgaggtggaaggattacttgagtgcaggagttcaaagttacagtgagctatgattgtgcccgtgtactccagccttggagacagagcaagaccctgtctctaagaaaccaaccaaacaaaaaatcttccaaaaggcattctcgtcagtggtaaaatttgttttgtttttttcaccttcaattccttgttccgaatactatactgaaacccagaaacgtagctatgacctcttgtgtttaaataaatattacttctgtagccaagtgttctaattgaaaaccagaaaccaataattcttcttccaaaaagtataacatcttaattagtataaaagatcttcatctaggtgtggtgcactgtaattgtttttgttaacctgctatccccattgtaattctctcacagaagtaaaactacttgtggagaattgtctgctgaatttcagcctctggagtgcagtggcatgatctcggctcactgcaacctccacctcctaggttcaagcgattgtcctgcctcagcctactgagtagctgggactacaggtgcacgccaccacgcctacataagttttgtatttttagtagagatggggttttgctatgtgggccaggctggcctcaaactcctggactcaagtgatccgcctgcctgagcctcccgaagtgctgagattacaggcgtgagccaccgcgtccggcctccatataaattttagattcagcttttaaaattccacaaaatgccctatgggtattttgatggggattttattgaatctatagattggtttgaagagaatccacatctttaatgtctttcacattatgatagagttttgtggcgatggttgtctattcatggtaatctctttcagtggagcgtgaggctctccagggcatagactttctcggaatctagcacaggccaggcatgtaatgagacactcaataaaagcttgttttgctgaattgaaattatttgactcgaaccctccatcttttttagttctcttaatatctctgggggattctttctagaccagtatgtaagtaccaaggaatcgtggatggcagattactgtaaagatgacaaggacatagagtcagctaaatcagaagactggatgggctcttcggtggatcctccatgttttggacaaagtaagagttttcactacatgtgtttaactaaatcacttttgacctacaaagcaatgcttcactgagaaattcaaatggaaccatcattctgcgtggaaaaacctacaggaaattctgactatcttctgtagttctgttttagtctttgcaggagacagttttctggcatgaactactgaacttataaatgtgggctgtaattccacctttgcgggggagaaaagatctgcaacacgtaattcctaaatcctggtaataatgcatatgaactggtgcacctgagaatgcatcaggatcagctgtggtttgtgttttactctgcaaaacattggttttctaattgatcggatttttttggccagatttttaaaagcatctaaaatggtcttctaaatctagagatagagggtttggacatattcttgaaaagagggcgagcaggagcccatgtggaaaaagttgttaaaaagggagccctgtgctgttcatagagtataaaagaattgaatgccctgcctcttgaagaaagaggagtcagcttgctctctattgatgatgctttctttccttatttaatgcctcgccagctctgttttcctcagagctggggagatggtgatggacaactgcatggtcttagttgttccacaagccattgtcatccaaattcaactcagctccaactcttacaatgtggtttctttggggagtcttggctggacttcacatagctcatgaatacttaaatattccatctggtctgcaaacgtgtcatgggaagattgggtgttcttagtgtgtgaagtaattgtactggttcatctctcctcagggtgaataagtggactttctgtctgccttgtacttctagaaagagacacaaagaaatgtcagctgtgcttgttctctgttttcccaggctgttgcttctgagtctcaaggtcattacttaggagccagggcttttcagatattgtcagctttgattttagctcctcctccaaccttcccaatttgtgtgtcaagaaaatgtaacatagtctacccagaagactctaaataatctttgtaatatgtccaagagagtgtgtttctaaaacattattcatgcaggggcatcttcaattcagagtcaaactctagcaaggcctggtctgcaagattctgatgaaagattttcttgtccctctctttcttctttccttcttccctccctgcctccctttcttccttcctttttaaaatttttgtccctctctctttctctatagttaaaaggcttcctcatctatattaaatgctggtgctgagttaaagcttgatttttatttatttaaagatttttatgattacttaggcttataaaagtgtaatctatctttttaataagacataacttgaatatgcataaatttccaaacctcttttcttattggaaattcctggatggtagtacagtacattccaggattgtattcttttagcaggcctactaaaatgatcattgggaatttattttgaaagtgagtagggttcaaccttgttgaactaatcataaactttcaggtcttattcaagaatagtaagtcatattcctacaaaagttatgctttttattcagactggccttaaaacaagctcttgggaatagcccttaacatgaaatttagcctaagggacctgctgctttctcactgtttctttatcaggggaaagaaaataccagcctccttttgacaaaattgttggctttgttcagtcagggctgagattttgcaggtaaacctgggcggtgtggcacttcattgaatttattagttttgtattccaaggacattttatgaaaatatcaaatattctgaaaacttccatgcttgatttagaatttaaataaacactatgagacaactccttggtagagattgtttaaatttggaacacatactgactcttcccctgaatttttgagatcccctgagactggcattttacttctgtgttttaccagttggaatggagcaaccttcactaaaatctgtactgatggatttttgtaactttttaatgccatttaagaacataacacctttaaattaaaaatcttcaaaaggctcgtcattctgttcaagagaaggttcaatacatattcttctaattcaggaaaaaaaaaaaaaaagcatgttactttgatccagcctccacaataaaaactagcataaaaatgtgttcactttgtcaagtacattcgtagtgcttagtaatcactgatgggaatgactctgtacttgcatgatgcttgctatttttgtaatgttctctatttgtgcttatcgtttggaagcaagtcttcttatttcactgtatttattcttagcctctaactttgtctctcctgtctaccaggcctcccccttgtctaccttagaactaggagtacagccagtctgactaacctagagcaccagatctatgctagaggtacagtatagccaagcgagggcttgctttattttcctgttttaagaacttccttgtacatcaattttttttttaatgagtgggagttgaattgggggtattccatgtcgtgagtactttagtaataggaaagaacatttccaactgatgaacagagtggtgcatattatcagctgattcttatattgtttcccttccatctcccttaactttggtggaaatggaataaactccacagtgtatgatgcagaaatatgttaatacaatgtcagttagaggtgatttctcatattgaagagcaagtggattgaggagcaccatgcttcatcaagcagtggtgccacaagtcttaagtttataaaatacccactgaaaattctcatgggaaggcatggggctctgcaacaggcactataataatagggatagcggaaaaaaaattctcagtaaataattgcttagacacaaaccttaatttctttggatgtcagtttttgtgtttaggagataaaaaagaaaattttctttatttctatctctgatctttgaaagtttcttgagaaattcactggtaagtgaatgtggtagaaaacaccataatcattgaggaattggagtcccaagatgttcagtttttgttttagggagtgcagtttaatctgaatgatttatgtgtgtacatggcaaattccagattattcgtcatgatttttttaaatagaaagagaccacaggaactccctctaccaggaatatagaacagggatgttaatactcagggtacattgccctgggttttttttttctggacaattttaccagggtggatgtttgagggagggctcacaaagaaagcccagagctgaatcttaatttatttgtgtattcctgcttctaagctttctatatgttacttaatctttcaggcttagccaagcattattcctatttagctgataaggacagtgaggttcagagacactaggtgatttgcctttattcacttgacctcctagtagcaaacctagtattttaatctgcttcttatgatttacaaaccaggtcctttctgatggactgagctgcttacatagcatgacaacctacactgtttataatggcaaaattactgtgtgaaacaagtccgaaggggtagaaatttccttagctggagctgtttgaagctgaacttggatacgggtagctttagactctctctcagcccatgaagaaattgggtttggtcactaggggcagattttctgaggccattagggaataatgttctctttgatggacttgggaacttttgtctctggtgctgtgccaaaggcaagtacatagtttatttggaccctggtgcagaagatgtcagatttgttgcctgatgttgggcttggatttgcgtgcatgctgtgtatttttatcctcagagaaatgggttattgaagcctgtgccattatgtctcatcaatgcaagaagcttggagacctaagcattgtgcctacccatgctatttaactccaaagcagtatacttgtgaatatatttgtatggattcgcagcactttattctgtataacaaactgatcaaagccatctgccacctgttctttttaaatctaatttgcaaatggaaacttacagtctggctcacagtgggatatgaaagcacatctggcttctttttctcctgggccctttatctactgtaataaaagcagctctctcattgcactcatagaagagggaggtgcctttcaaagtgccacagtaaataccgtttaccctgcagacagctcttaaattttttactccccctctgctcttgtcagcagccttacagctactccttaattttctacttgatgagcactaatttttttttttaaagcaaactttgggagctaagtaaggccattggggtgagaaatgggcatattcctagtggagattatctttagatgtatttggggtatctctaaatgactgaccacaaaattgtgggaataccctggagactgctcatttgtttagcagattactatatcttagactcccctgaaccatcgttgttatcaaaatagaacttgccttgacccaaaattgcttggtttgcattgtttacagtactaacctttcaaaactttaaaagaggtaagagaaaaaagggagtgattgctttttaaaaggcagtgacaattaccgactgttatgatacagtcccagcctcagtctggaggttgcagaaggcaggacatgttgcagtttgtcttctcgattttgttgacagaagatgtcctgtaggatgaattcagttttgccttagtgttctctgcagttagcatttgcagcttcctgtagatgtcattttctcccagctgcagagcatgtgggtcatggtctttctcacgctgtcttcctactttaatgctagacacataagaagattgagccacacctcccttttttttgttggttgtgtacgtgtgttgtgaacatgtcaaccaggaggctttctcacactggtttgctgctgctgcctccctatttgtgtggccagtggaggagacaggtccttggttagaggagctgctgcccttcctttcagtactctgtgttccatgtggaaccacatagcatgggcagtggtacctgcagagggatctgtctgccaaagcagctggggcaccagaaagcctgctttgggtttcttacaatgtttatagtcaggtcaccgctctttagaatttggttacttacagttttgtattgattgttgtttctttccacattccctgattagaagctttttgtgcaatgaagccatattttatgttccttttatggcttccatggtacccaccttataatagatggtggtggtatctatgtttaaaaaatgggctaacaattttgtttgaaaagctttgagatggtctacttctgcctttccagggagacaaaaacaactattagtataaaagaataggaaagaatgtttttattttattttgttacaaaatgcatactatgactgtagggtaacttatgtaaagggagacttccttaaggtaaaggctttttggacaaagtttaaataagtacatatgatatatcttgctacattttaggttacccacttagaatatagttcttggcagcactggggaggtccatttttatttctttcgtgattcccaccaagttaggtcctgatgccttcttctgagagataaggcctgtaagagttgtggaagaattgggggctgggaatagtcaggcagggaccaaattctcccatagcagccagcaaatacgtggagcttccatttgtcctgttccttctttcttgcttccaccttcagcccctttgcacaagagacaaatttgggcactgtctccaggttgggggagggtctctgccatgcagataggggcgtctgctcatagccttcttctgtttgtcgtagcagaggtgaaaacccccaagcgccggcagccatttgtcccctttgctctgaggaaccacacggggtgcactttgtggtttgccaccctgaccaccacacccaccaggtaagcagtcagtttatattaccccgagtcatctctgccaccaaagccttcttgtgccagcccagtagagcaaggtgggccccctcttgaggctcttgggatgatatttgaatgaataacttgctgtcttgctgagatttatgatggaggttctggttttgtagagaatctatagtcagagaagcaggtcctgagtctaattatgatcttgtttttggtataccttatgtttaaaagccaagcaaattaaggatgtgagcaggaagtatgaaaaagccattccatcttttctcctcgatctctaccttctttcccattttaaagagctatgtgtggttatcacaccaaatgttttgccattttattccaagattgctttgaaaacatccccattctccctctatccctaaagaattctttcatacctaaaacgcacttcaacccagatggaattgggtggagtttggagaacaaaggagactttacctaagccaggcgagaaccttttctaacaactttctgcctgtttagatcttggctcagccttccaagtacatggtggtcgttccagctgaggtcatgaagtgcatggcatgagtaacagaatccattgatttgaaatcacatttctccgacctcccccaagtatgagactgctctagaagagaagcttttttgttttaacagtgtaggtctgttaaattccaactaatcacttaaatgccacttgaaaaagtcatgccttaattcacatgtaccagattctactgcctgaggtaagtggctacagagtgacagctttcagctgtttctaaaatgtcaaataagttgtgattcagcacgaagatagctatagttagcgaccctcaaggtcattctttgtagctaggtcatgcagccttttattgctgggaattgagttgtgagaaggttctgctcttctgcacggggctcctgtgagagggagctgggaagaaacagggacaggctgatgtcatctgatttggttccagagctgcactctctcacagtgggagtccaggggtagttccagaagggaacggaacatttctcgatgatactcacaatgttagtgaatggcgagaagtccttacaggtgaagagattccctttgaatttgaagcaagaggaaagttaagacacaggtaaagtatggtttattcttttctttaaaaaaaagaaagtggatgtaagtgagggtccctagtgttttgtctttttactttccttataaatgattttattttattttattttatcttatcttattttattttatttttgagacagggtcttcttgctctgttgcccaggctggagtgcagtggcacgatctcagctcactgcagcctctgcctcctgggatcaagcaactctcctgcttcagcctcctgagtagctgggattacagggatgctccaccacacctggctaattttttatttttagtagagatggggtttcatcatgttggccaggctggtctcaaaatcctgacctcaagtgatccgcttcggcttcccaaagtgctgggattacaggtgtgagccaccacacctggccccttattaatgattttaatgtcttctttttaaaagatatttcgtaaatcagtgtttccttttattattttattttattttatttttgtagagatgaggtctcactgtgttgcccaggctggtctcaaactcctgggctcaagcagttctctcacctcggcctcccaaagtgctgggattacaggcgtgagccactgcacccagcctccttttaaaaaataaagactttgctgccatcttggaaatacatgtcttttcattaactatccatttatttgacatatgaggtgataacctgtgtgtttcacagaatttggtggaaacatagacatatcataaccctcaagtttattgcatcttggcctgattttcatgatggattggtgatatggtattcttaaaagattctcaaagcatgttgatttcaattttaatttacatatatgccacgtagtacttttaacaagcagctagtttcaggactcaaagctaataagaagacaaattctgattctaaaaagaactgatctggggagactgctagctgatgcattcctgaagtacccatactcaaaactggaatgaatgtgagaaaatgttctatctgattactgagagatcataaaatatccaataaagtgttgtattatttacaagtatttttctatgcacaggctatccagtggatatgaataggttaagacagcatttgaataggttaagatttagtatttgagcctcatatttgttttcaagctgagctgaaattgaagagattggctttagctttctgtaatcatgtgctttttgtggtgctttcagttcctgagtgtaaacttgctcccaagtcaagcaggtttccttttgcatagctttggtacccacacacattattcccaagaagcaagagttctgaacgtgtgggtctccagggattttatagggaaaaaaaaaatcactatgctgggcacacatgtgcttggaagccactttagcttccaggtaagagcagtgagcattttcctgttggtccccacagttcttggagaagctaactacagaactgttgggaacatttctggataagcccatcctctgtcatatcagaaagggtttgacctctttgtcatttctgtttttgtttccgtatttcataatccatttcaggtcccactattctgcttgaattcttcaaaataaatgccttttctggctttttccccttttggcacactgcaccccactccttgcctccctccccgcttcctgtcagcctcaaatctagttccccatttcacttctggcttgaattaggcaaaatctaaaatagaattaaatgtgcagtttcctcctgttcctcctgttctgcccactgccttctgctccagtttcagtcgagcacaggagccctgaaatgagcgctgtgcctctcctgccctgtctgtagtcacgtagggctggagccaaacaactgcatgtggttctgagcgaattaggatttcaacaaaggaaccaagaataattttttatgcatttccaagagtatggttatatgattaaatcgctactgcatttttaccaccccagtgacatcattatataggttggggtgagggttggtgggggaaagaccttggctcgtgtttaggttttgcgtggtttgtacaatggaggataaatgccactcttactcagtcaagctttacagatcttgcagtttgtgttgtaagtgtaaaacccagttaaactgtgctcctgatttcccttgcattaggtaatctccaaaaggtttagccaactgggtttttacatcatatgtactaaatcagatttgtgtctttgcttctacttttcatcccttctggagattgtgcctaatatctttttctttgttctgcctgacagacacacccatgacctccggattcatcaactgcaagtgagagtaaatggctgggagcaagtgagcccagtgtctgtggacaaagtcgggaccttttttcgatatgcagcaccagataaaaattcatcttcctctacggtgtgtgacattcaggaagtcagatggttaagcgactgtcaggaagtcagatggttaagcctgtaataagcttactctaatgaaactttcttgttctttctttcccctaattctaggactgactgggtcagtcataggcattggtaatcaatatgtagataagccagccaatggttagtttcagtagaaaaacaagatttaaaatcagcagtaacacatttcctcacctctgtagatccatttcatgctagctggcctgactggcagtttactagtctgctgaacctgagtcttgtttttatttcacatattgttatgctgtccatatacactgtgtttttaatatttcttataatgcagcaccttgatccttttactctgtgtctccaaatctttctctgtggcacaaagagagatgtccactgtcgtttattttctgatcacacatgctctcacatacccttcctgcctgtagtcccagtggttggagggacagcccaggaaatgatgcaggtggcatccctgacttgtacatgcaggtggaggctgacatcctggctgacagagctgccatgggtcctcttgccccatcctccttcatacttcatggaacacttgcacttatttttgggtagccagtagtgaggtggaaatgcagacgtgcagagatattgcagctttcttcatgaaaaatattcttagaaaacactgttgcacaactgtccatttttactgttgctcttgtgccccaagtttcttacaaaaaaacaaaaacaaaaacaaaaacaaaaccttttcaggattacttttcagcctaagtttatgtctagtaatgacaggaccagttccctcataggtacctttcttactgcattgatgtgttggggagaaatttggcatacgttgaatggttataaaatgaatattgttttttccatatctttaagaggagatgttttatcttcatagtagactatactttacttgaaagtatttacaaacacgaccctttgaagaaaattatgttgtcattgaatttaacgttgctaattatcttaagtctgtgctgactctaacttttgaaatctttttcagattggcagcccaagcagcagaacaaatattatacatccccaggtttatgtaagtatgattttcctgttgtcattgtgtttattgcgtatatacactgcacctgaatcatgtggatatacatttcttaatgatcagagaaactttatgacatatatgcgattgaaatttatctctgcccttttctattaatgattaccttccttttccaaaaacttgcaagaaaatgttttcacctagcttggtgtgtgagactaagtattacagggaaggagaaggaaaaggcaaatgtttggtccaaggtctccttttcattctaagttaaaatagaaatgaaccctggtatgaccatatgtgtttcatagttttgggtccaaaggtcatgaaagtaaataagaaggaaaaagtagcagtttatttcctctttggcttttgaaacatcatcacgaaatgacattaacaaacttattccaggcttttatttataatttcttctccctgatgattgtaggttttgaaacaaaatttcaggtaggcctgaacaatatcaaggtttgaaacaacatcaggatttcttttttttttttgagacggagtctcgctctgttgcccaggctggaatgcagtggtgccgtctcagctcactgcaacatccgccccccgggttcaagcaattctcttgcctcagcctcccaagtagctgggactacaggcacctgccaccacccccggctaatttgttgtatttttagtagagatggggtttcaccgtgttagccaggatggtctcgatctcctgacctcgtgatctgcctgcctcggcctcccagagtgctgggattacaggtgtgagccaacgcgcccagcctaggattttaagtaattgttactggctttgactattggggccttttttgggttgggtcactggaagctggagcttcgatgatgatttatgcctaggattgtgtccttctaaaaacactctagaaaattgtagtttgcctttttgtttggacttcctagaagtcttggttcaaaacatggagctcttcattttattgtttattggattgactttcacttgctgtttgtcttaatgagaaagttggcagaatgaaaagcttgaatgtcatgccatttgtttctccagtaaaaagcattgttaatatgttctggacactcattctaagagtagtactttcagactttttctttggtgtacctaacatgggatttttctacttttaagaaaatttcctgtcacatggtattagcacaaaatgtgtgttgaatgtgtgaatgaacatatggaaaaataacgtaatggcggtaacccaagaccaaaataaataattgcccttcattatgttgagtttctgaaccttggtgtcctttttatgaacaagtgattatttttaaagttctttaaaatacagacattggtttttgtgtagacatgtcaacaaataatatatggacctaaataatatattttatgacatttagaaaaaaagaagttattatttgttcctatgaaaggcacaccaatgcagacaattctttcttttacactttctggattttacaaagacaaatgttaatctcagaagacttccttctgtttttctgtatttgggcagtacccaagccattgtttggatattaatctaggaggaaaataacacagaaggtaaatcatttaatgttttgcaaagtcctacctcattatttctaattttaattgtgttggatgttctttatttaattccctgccagtagagtagaagacaagcctttttcagtttcgttgtaaggaactcaggggctttatgaatcaaggataatttccagcagatactttcttaccaaattacaggaagtttggaaaattggataggttattatcacagtctcaggtgaatgtttttaataatgtttctagaggcttaggactgatttttcttagtgacacactttgtgatatcacatctgagtggattatctgtttttgtagaactttttagaatttttttttttaacagtgtataggatgtttactccctttaaagttgaatggctttagggttttatgactgatttcactgaagaactatagtagtaataagacacttttaaggtagacattctgatcgatattattgtattttatatgttttttcagaaacataactattttgtctttatcgctctttcacagttctcttcactcccaccagtgcgggtggtctttgcagtgactatggaaggcagtgcacggaaagtcatcactgtccggtcagccctcattgtgaggaacagacttgagacaccaatggaactaagactggatagcccatcagctccagacagtatgttttgattgtctagcatatagtaaatgctgataaatacttcttgactgttgtcaagtctctttttccccagtggtatcttccccagcagtcagtatatatggtctgtcttcttttgtcctgagatggtcaatctttggggtggaggaccattgcctgaaagtgttaacccttatttctgtggcagagccagtggtgcttcctgctatcatgccaggggattcgtttgctgtgcctttacacctcacttcttggcggctacaggcccggcccaaaggattgggtgtatttttctgtaaggctcccattcattggaccaatgtagtgaagactgcagaaattagtagcagtaaacgagagtgccactctatggacacagaaaaaagccgatttttcaggtatgtagcaccactgcagtgacatgtcacttttgccttttttttttcttttggaatgactattaccattctttctctaaagacccttagagattcagttatctttatttaaactctaaagttcttattccttgagttttagttagagttcatgagaactcaagtgctaacggttggtggggtctggggaggctttattacatgggagagacagccaacacacatgctatttacacatacaagattagaagtttgtgttgtacaacagcataaagagaggacatatagagacgggaaggaaaacaaacagaaaataacgagttctcattccaaaattggaaagcaaaatcctggggtttggagttttttgaatgagagatttcaaaataatttgaaggtttatgtacctcatactgactttcttgagaactttgacaaaattgcctaaccatttaaactcctgttttcccattatacgggagtatgttactagattcagtgttggaaataatactggattgctatgttacaccctaacaaatttagactttcaacttatttaatgaggattagctttagtttcttttatagtgaagacaggcattcatttagtctaaacttagagaaaagatacaagaatagtgtaaagaatttcattatactctttacccagatctgcaaattgttaacagactaaaggaagaaatacatcaaatacatagctggagttggtgattttaacacttctatttcagtaatttatagaacaaagaaatcaataaatatgtaaaagatttgaacaatgttatcaatgagcttgttataatagacatttatatacagattatacattcttttcaagtatatgtggaacacttatcaagagagatcatctgctgggccataaaacaaagatcaataaatattaaagaactaaaaccatacagaatgtatttcctgatcacaatagaagtaaactagaaataaacaataagaagatacctaatcccaaatattgggacattaaacaatgtatttgtaaataatccatgggtcaaaaaagagaaatcacaaaggaacttagaaaatattttgaatcaaaaggtaataaaaggcagacatgtttaaatatgggggatgcagcaaaaccagttccgagggtagaagttatagtttgtaaatcctcatattagaaaatggggaagatctttggttaagtctcaattaatttaaaaaaagaaaagaaaatgaagaatatataaaattgctgatttaatcttctgccttcagaagttagttaaagaacagcaaattcaaaacaaataggaaaaggaaacaataaaaatatggatggaaatcagtgaactagaaaatagaaaatcaacaatgtcaaaattgacataaatttgacaaacttctagcaagacttgctgaaggagaaaagacagaacacacaaattaccaatataaggaatgaaaaaaatgaggcactattacagatcctatagacataaaaaggatgaaaaggaggtaagaacaattttatgccagtacattccagatgtaaatgacacctttcttgaaaaacacaagttatcaaaactgatacaaagaagaaatagaaaatccaaataacccagtatctaaattaaaagaacttcaactgttagaaaagcctttgtccacaaagaacactataggcccatataacattactagtgaattctaccagacgtttaaggagaaataataacagttttacacaagatctctcagaaaatagaagaggaaagaacaattccgaactcattttatgaggccaacatatccctaataccaaaacctgatacagctactatgtaaaaactgtgagccagtgttccccatgaagaggtgcaaatatcattattaaaaattttttcttgttttttttgaggtggagttttgctcttgtcacccaggctggagtgcaagagtgcagtcttggttcactgcaacctccgcctcttggattcaagcgattctcctgcctcagcctcctgagtagctgggattacaggcgcctgccaccatgcccagctaattgttgtatttttagtagagatgaggtttcaccagttggccaggctggtctcaaactcctgacctcaggcaatccacccaccttggcctcccaaagtgctgggattacaggcgtgagccaccgtgcccagccaagtttttctttttttgattgagacagagtcttgctgtgtcacccaggctgcagtgcaatggtgtgatcttggctcactgcagcctccgcctcccaggttcaagtgattctcctgcctcagcctcccgagtagctgggattacaggcacccaccaccacaaccggctgatttttgtatttttagtagagatggggtttcaccatgttggccaggctggtcttgaactcctgacctcaagcagtctgcccactttggcctcccaaagtgctgggattacaggtgtgagccactgtgcccagccctttatcaaaatattatgaaatgcaatccagcaagtggtttatcccagaaatttaagattagcttaatatttgaaaatcagtaaatgtaactcatcatattaagagactaaaagaaagtcaagtgcagtggctcacggctataatcccagcactttgggaggccaaggtgggcagctcacttgagatcaggggttcgagaccagcctggccaatatggtgaaactccgtctctagtaaaaatacaacaaattagccagacatggtggtacacgcctgtaatcccagctactccagaggctaaggcaggagaatcgcttgaatctgggaggcagaggttgcagtgaactgagatcacaccactgcactccagcttgggtgacagagcgagactctgtctcaaaaaaataaagaaggagtacacaggccacagaattggaaaaatacatatatctgagaaaggatttttgcatggagtacatgaagaacttcctacagatcaacaataaaaagataataaaaagaatagacaaaagaacggacaatttacagaagaaaatacccagccaatagacaaatggaaagatgctcagtgtgattattcactagggaaatgcatacagtgggtaatgttttactctaattgaaatggctgaaataaaaaaagaatgacaacaccaagtgttgacaaagatgtggagccactaaactctcataagtagctagtaggagtgtaaaatggtataactactttggagaaatgtgtggcaatttcttataaaagttaagtactggccgggcacagtggctcacacctgtaatcccagcactttgggaggccaaggtgggggatcacctgaagtcaggagttcgagaccagcctgaccaacatggtaaaaccccgtctctactaaaaatacaacaaattagccagacatggtggtgcactcctgtaatcccagctactcaggaggctgaggcaggagaatggcttgaacccaggaggcagaggttgcagtgagccaagatagcactattgcactccagcctgggcaataagagtgaaactcagtctcaaaaaaaaaaaaaaaaaaaaaaaaaaaaaaaggacccagcaaggccactctggggtatttacctaaaagaaatgaagatatatgtccaaaaaatacttgtacaagaatgttcatttaaccctaaactgggaaaaaccaattggctatcaagaggataatgaataaattaacagcaatttattcataaccatggcatactactaggaagtgaaaaattatcaaagaggatgtatagaacaacatggctgaatcttgttgagactttaagttttagaagccagacataggccgggtgcggtggctcacgcgtgtaatcccagcattttgggaggccaaggcaggcagatcacgaggtcaggagatcaagaccatcccggctaacatggtgaaaccccatctctactaaaaatacaaaaaattagctggacgtggtggtggtcgcctgtagtcccagctactcggaaggctgaggctgaagaatggcatgaacccgggaggtggagcttgcagtgagccgagaccgctccactgcactccagcctgggtgacagagcgagactgcatctcaaaaaaaaaaaaaaaaaaaaaaaaccagacataaagagtagtacatactgcatgattccacttatatatatgcagttctataacagaaacaactaatccatagtgataaatgttagaaaggggttgcctgaatgatggaggagaatatcgattggaaaaggacatgagggaactttctggggtgagggaaatagcctataatttattttggatggtgtttatagaggtgtgtataattgtcagagctcatcaaactgaacatttaaaatctatacatattattgtgcatttatatcttaataaatgtatttggattgaaaactgcaaataattttactcattgaaccatcttaatgttattctttctcatacttagctaaggagaaaaaatttaagttcttcattaagtctgatgatttttacaccattttatcttcataggttttgtgtggctataaagaaagagaattatccagattatatgccctcaaacatattttctgacagtgcaaaacagattttcagacagcctgggcataccatatatctcctgccaactgtggtaatctgcaacttgctaccctgtgaacttgatttttatgttaaaggaatgccaattaatgggacgctgaaacctggcaaggaggcagctctccatacagctgatacatcccagaacattgagctgggtaagaatgtagtcagatgatcatttgtcataatcctatgaaaatatcaatgagtattttgtgattatttatttggtaagcatcttggagaaattggggcacatataatatctcaataagccagctcaaaggaatcagtgcagttaaaaaaaaataacctttagctagaggtggcggcagtacatgcctgtagtcccagcttctcaggaggctgaggcgggaagattacttgagtctagaagttcgaggcttcagtgagctatgttcacgctactgcccaccagcctgagcaacaaagtaagaccctgtctcttaaaaaaaaagaacttatagaaaaggatgagaaaaaacttatcaagccgaaaggtttacagaggaggcactcaacagagccttttttcttacattgctacatgatgtatgattgtaggaagtcatttcatctttttaaactatgcttttcccaagcaaaatcttatgcctcttctctttttattgaaagtataaacgtttgctaagcactcactctattccaggcatacctgggctttttcacacttgtaatctcatgtaatccttatagaaatagttatttgccccattttactggggaagaaatgggggtttggaatgcatcaagtaattttcagttgtaagggttgttaaaaggaaaagttcagccaaattaaatttaaatgagtttaactgagcaatgaacaatttgcaaattgggcagcccccagaatcacagcagattcagagagactccagggatgcctcgtggtcagaacaaatgtataggccaaaaaggaagtgacgtacagaaatcagaggtgaagtacagaatcagctggattggttacaggttggtgtttgccttatttgaacacagttggaatactcagcagtgtatgagtgggttgaagtgtggcccctgggattggccaagactcagctgttgttacaggtgcataatcctaaatcaggtcttcaatcttgtctacctattaagttagctggcagttcatccacaaagattcatatagaagtacggagtcctcaggccatatttagtttgctttaacagggtgaatgaagtcaaagtagagaatcattgtcatatttgcaacacttgaaacaaagaggaatggtgatcatggttaacaatattgtatggtgtatttcataagagctagaagagaggatttttagtattctaattagaaacgatgaatgtttgagatgatgaaaatgctaaataccctaatttgatcatttcacaatgtgtatatgtattgagacatctcactgtacccccaaaatatgtacagttattattatgtgtcgattaaaaatttaatttttttttgagatggagtctcactctgtcacccagggttagaatatcaaaatatctaatttatatctaatcatatgggttaggatatctaacccatatgattatgcaatttaggctctctagtgtgattccaggccttctggtttgcttatattgatccctaccctagctagagagaaagagccattctaatgaagatttttgcagttagatacttagttattggtttttccaaaaggaatccaatttacttttgctgtgagctattttgacaaatagtgagaactctgaaagttaatagtttgtatcttctttaggggtatcactggagaatttccccctctgtaaagaattgctcattccacctggaacccaaaactatatggtgagaatgcgactctatgacgtcaaccgtcggcagctgaacctcaccatccggattgtgtgtcgagcagaaggatccttaaagatcttcatttctgctccatattggctgattaacaaaacaggtacatacaggggctgctcaagtaggtctttggcgttagtcatgggaattcagatttatttgcttagctaactaaatggagccaatgcaaatagattacttcaacagtctgagctgctgaaacattcctgcttccatcataaatgcttaatcatgctcaaaactgtctttttaggcaagaaactgagcccactaaatagattcagttttcactcttttcccgcttgatggttttattcattcaccatttgcatctctttcagatagactgggtggtattgatgtaaacttttctctccttcctaaagggttgccactgatcttcagacaggacaatgccaagacagatgctgcaggccagtttgaggagcatgagctggcccgtagcctgagtcctctcttattctgctatgctgacaaagagcagccaaacctgtgagtacagttatttatgggaaggggaaataagctcccagggaagggaagaaattagtaaaggctataatatatccgtgtaagtagaaatatactgtagataacaatcctgacttggcaggggaatagaaccatgacctaatgggatttttggggatctaatttctatgttatttgatactgaaaataaaccatttggttggtttataatgaaagctagttttattttacatgcattgaagtagttttcctattcataactctgccaacgaagagaaagccacgagttctccttctctgctctgcagtttttcttcccctgtaaacttggagcacaggcacaggagctgtcatcagaatggacataggctggttctttggtgaagccgtcagcctcattaatccaatccaggatttgtatcacatttggaaattcatcccttttacctttgaagtaaaatgtgccattttatggtctcagagcactcattgcatgtttaaaagcagggacaaaaaacaactgtgaggattagatgacatgtgcttttaatgtatggtaggagcattaattcacttttgttcttggttttgacattttgctttttacaagagtcttttaatagagctctaatcaaagataaatgggtgtatccaataatgctaaaatgccataccgtgttatcggtagaatcgtgctgacagcttaacagaaagtcttctggggtaccacacttcagtgggtactgatgtgtttacaagggaaggttggagtgtagattaccgtttgaggcatggaaagaggattgatgagagttctggatattgtaggggatgcagccagcctcttggcatgtgcagccagcccagtctcattcttctcctgaaatgatttggacagttttagatttaggacttgacatgtgtcacacagtgtgttttatctgtgaattccacagttcccaaagcatttcacatagaccatctcattggattcttcccaccatcccaatggtttaggcagggcaggaaatattgttatattttaagatgaggaaacaggctcagagagattgctacctgcccaagtttacatcgcttgttagtggtagagctggaacacacattcaggaattatgttgtcgaaatccatgacaggacactggcccactaaacagtgctttgctattgtaatagtatcaggccggctgggtacggtggctcatgcctgtaatcccagcactttgggagaccgaggcgtatcccaaggtcaggggtttgagaccagcctggccaacgtggtgaaaccccttctctactaaaaatgcaaaaattagccgggtgtggtggcgctcgcctgtagtcccagctacttgggaggctgaggcaggagaatcacttgaacctgggaggcgaggttgcagtgatcctagactgtaccattgcactccagcctgggcgacagagcaagattccacctcaaaaaaaaaaaaaaaagtatcagcccttagaagtaatgcatcatacctgtatcttctgtacatatgcttcttgtgctttttaaaatgaacccttgaaacagcagagtcaggaaaggattagtttgacttgaattctttatttttaggggaatattagaaattgcaccactttcctcatgtgttatattcatagaatcctaatgttttctcctaaagcatttagttgtagatgtcagtaaatttcacacactgttgtactgtggctgcctctaagatacagctttaaccactgatgaattttgtcactgtgctagggaatcacatgagagtgaggaagagagtcagtggtagagatggaacttgggtgataactgtattagtgtttcccaattagaacaggcagataagactttcttgtggatgaatatctacatctttgcttttctgccccacagctgcacgatgagaatcggaagggggattcatccagaaggcatgccgggctggtgtcagggcttctccctggatggtggtagtggtgtccgagctttgaaagtcatccagcaaggaaaccgcccagggctgatctataacattggtgggttacatttggggcagcgggacaatcagaaccattggctgatgacctcaggcttggaggaatgacctggccatgcattttggcctgactacaagtactgattttcttatttggcattgggtcaggtatctgttctctgaatgctacagtgatatcaacacagatctattctcctggggatctgaggagccacctaaacactgcccttttgaggtctgtggctctgtttaatttcagactcacctgtgtcaggaaagtatcagtttggcttgaatccttgtttttcgggggaataataggaacacttagcatgcctttcatcctccaagtattcccacgcattcattaaaatttgcaagccctaagagggtaagaagcattgttctccttgaaactgaaggagagaggttaagtgacctgcctagatgcaaaggggaagtctgggtcagaagtaggatcaggattgggggatacaaataaaatgcacttggtggttgtagtaattaaagcaatctccagactcactttgcttatggagatgggaagggtggaaaggggaggggaggatactgtacccatatgcctcatagccacttgagaacgctcaaaagattctctaaagggttaagataatttgattgaaatatgaatcagggtgaaaattgtagcagcgcatcctttcagtatataatttcccagcctctcaaagcaatgtttagttttgaacattggaacaccatctatgactgcatggtcctgtagaactttctgtgatgatggagatgttctattttgcactatctagtagtagccactagccacatgtggctgctgagccctggagagcacattagtgagaagtaaggcaagtatggctgaggaattgaatttttatttaattttaatgaatttagctttaaatagccacatatggctactggcaccgtattggacagtatgcacatagtgtcatagttccttcctagagcaaggaaaaactgatgtgatatcatttacatatttatcctgagtcccatggagaatcaaagatatgtttaaatgtctgaggatttattaataaaagaatcttccaagtatagtttcctctttggatttttaatcataggtttgtattcattctcccttgacatgtgaactgtcttcttaaagttgacattaagatttttaaaagaaagaaacttgatttgatcttgcagcacaggatagttatcttaacttgttctcactttcgtttgctccaccctttgaataggcaaaggctgctttatgctgagtttggctttctgctggagtgttttgcccttgatgtattttgcaaagcaagctaccacaggttgactggaagctgtagttgggacaaattgggatgggaggagcttgttccttttatagcagctagcactaagaaccacagaattcttgcagaggccagttgagcaaaccgatcagacatatgcagtgattacccatataagctgttatgctaggagcattcactaaagctcatggcatatgttttgagggctaagactgtgatttaagttttgttgatccacctagggaagggatagagggagtgggctaagataggactttatcattcttgagggtcatgaacttttgccgtatattcccacaagggaatttgtggaatctcctgcttgaatattttgaagaataggatagataaccaactccctatcaggaaagtttaaagcatagtccaaactgaaaagccagggacaggcttgccaggtagcctcacatggatctccaaaaagaacgattttgtgcctgttgatcttatcaacttattgatttatcaggggtttcccagggcaatataagatgtgaagggggaaagaagcccacctttttccaaagattgagtgtctgtattgttcagagtaccctagactctttttataatattaaattagatacatcttttgtagttagactttttattagatatcacctaactatgataatgttgatttctgacaatgaaagcttctctgcatgtcacagaaagaagtgatagggtatagttccatatcccaatattacatagcatttcttagatacagagttttagagagatttttgtgtgtgacttttctcagtctttcaggtattttcaaggcttgtgttaaaggaacatcagcattttcaagccagtttaagtgaattacggcatttacagattggaatatttataattgggattgtgttgagaaatctatgacagccggttgtcaaatgctaaggtggagttttctattttaatggttctcttgatacttgatgactgctgaatggagtgcagtccttgtatatgtcgcatcacaatacaagcaagcctgatgagggtgctgctccggaggctgactgcctggacttgaatcccagttatggcacatactagctgcgtgacatagagtcagttacttagctttccatgccttcgtttcctcatctataaaatggaaataattaaaatatctaacttagaaggttgttatggggattcagtgtaaagcctttgggggaggacctagcatgtattaagagaccagtaattattattattgttgttgttgttgttatttttattatttctatgataaatatttttatcaatgggtgaccagagctcagcccagtacgttgaatgtcattgctgtatttattgtctgaatgaatgagtgaataaattcatcccactgaattttttatttttatttttatttatttatttatttatttatttattttttttttttttgagacggagtctcgctctgtcgcccaggctggagtgcagtggcgggatctcggctcactgcaagctccgcctcccgggtccacgccattctcctgcctcagcctcccaagtagctgggactacaggcgcccgccactacgcccggctaattttttgtatttttagtagagacggggtttcaccgttttagccgggatggtctcgatctcctgacctcgtgatccgcccgcctcggcctcccaaagtgctgggattacaggcgtgagccaccacgcccggcctgaattttttatttttaaaaattgttatcagagtttttaagatatttcagtgcttttctatatttggaaccggctgtcttgagatttcctttggactgttttcttattttttcctaatacatagtaggcgctgaaaacagtaattttatagatgaataaattcttttatttatttattttttgagacggagtctcacactgtcacccagactagagtgtaatggtgcaatcttggctcattgcaacctctgcctcccaagttcaagcaattctctttcttgcctcagcctcccgagtagctgagactacaggtgcgtgccaccatgcccagctaatttttgtatttttagtagagatggggtttcgccatgttggccaggctggtcttgaactcctgacctcaaatgatccacccatctcggcctcccaaagtgctgggattacaggcatgagccaccacacccggccatgaataagttctatagtacttagcattatgtttgagctggattcttgggcaatgggctaaaataaaatactggagaagagtcagtaaagtttagaacattacagaatccaagaaagtaatctgaaatttccactgtatctgtaaaagtggcaggttctctagaaggaaattttgtgtcccaggtgtaagccaaaaagtatcatgtgaaactgttgtaagtattcagcttcataaatggaaacctaacatatatgtgactggacacctgtgtattttagttgctgttaaatggtacacactgtgtgaagaaactaggaattaaggggatgttgatcttgcctctgaacctttttaaggcctaaatgggaataaggagtaataatactttgagtacaattgctgttttcattacattcctagaaggttcaatatcctctgggtgatacagttattttctcagagaaactaagtaactgtgaaggttatttatttttgtcagaccaagagttttctctcttcatggttaactcataaaagtggttcttgttatttgtaggtattgatgtcaagaaaggccgaggtcgatacattgatacctgcatggtcatctttgccccccgttacctgttagataataaatcatctcacaagcttgcatttgcacagagggaatttgccaggggacaggtgagcagtttgcttttgaaggatgagagtgcctatttaatagcacgagttttaatgtcatcttctgtgaagactgtacgttctgtgatgcaagtaactgctctgtgcctttggtacccagatagctcctgttagagggtaaggctcagagtaggtactcagtaacacttattgtcatgaatcgacttgttgactaaagcctgtgatcctatgtgttttagggaacagccaatcccgaaggttacatttccacccttcctggttccagtgtggtgttccactggcctcggaatgactatgatcagctattgtgtgtcagactgatggacgttcccaattgtatttggtctggaggctttgaagtcaacaagaataattccttccatatcaacatgaggtaagtttgagactctaaatatagacaaaaaggtagcccctgtttgagatgcagtactgtaataacaagccttgtgtaaaatgggcacaaatatttctggctcagacagaggtcttagaacttgcaaagtccagggaagtgtgaggggataatttgatggaataaactaaaggaggtgttgcccgttttgaccatggtgtaattgctgttgtctaatccaaagagtaacactgagctcatattttgattacctgcaactttgaaaggtctgtctgcatttagatggtaacgctcattataaatatttttgtatattctgacatatttatacaaaaccttctttcatttgatgctgttctagtaaatcatctggctttctacacctaatgtggtaacactcagttcttgttaagaaaaattaaccaggccgggcgcagtggctcatgcctgtaatcctagcactttgggaggccgaggcaggcggatcacgaggtcaagagattgagaccatcctggccaacatgatgaaaccccgtctctactaaaaatacaaaaattagctgggcgtggtggtgtgtggctgtagtcacagctacttaggaggctgaggcaggagaatcgcctgaatcggggaggcggaggttgtggtgagctcagatcacgccactgcactccagtcaggcgacagagtaagactctatctcaaaaaaaaaaaaaaaaaaaaaaaaaaaatcagccttaattagcccaggatgatttaaactttcttcttgctttcatcaaatactttaaaaaaattatttaaaaatattttaaattgtggtaaaacagatatcaaatttactatcttaaccatttttaagtatacagttaactggtgtaagtacatttacattattatggaaataatcccccaaactcttttcatcttgcaaaactgaaactctgtacccgttaaacttaactcctcattcccattccccttagtccctggccaccatgttctacttggtgtctataaatttgactactctaggtacctcatgtgagtttaatcatacggtatttgtctttttgtgactggcttatttcacttagcataatattgtcaatgtccatattaacatttttgtttattcacctattaatgaacacttgggttgcttccacctttggctatcatgaactgctgcgaacataggttcgcatatgggttcaagaccctgctttcagttattttgggtatagatccaggtgtggaattgttggatcacatgatcattctggttttaattttttgaggaaccaccataggtttctgcagtcattgcaccattttactttcctgacaccagtgcacaggattccactttctccacaacctcaccaacacttgttttctttgtttttgacacaagccttaagtgatagtcccgcctctgtataatgggtatgaggtggtatcgcactgtggtttagattcttatttccttaatgattagtgatgttgagcatcttttcatgtgctttttggccatttgtatatcttcattggaaaaaatatctgttcaattcctttgccaatttttgaattaggttgtttttgaattgtaggaattcctattctaagcgttttatagttttagctcttacttctaggtctttgatttgttttgggttaatgtttgtgtatggcataaggtgagggtccagcttcattttttggtatgtggatatttggttttctcagcactgtttattgaaaagactctcctttcccattaaatgatcttggtactgttgttgaaaatcatttgaccctacaggtggaagtttatttctgggcactctaatctatttcattggtctatatgtctttatgccagtaccaccctgttttgattatagttgctttgtattaaattttggaataaggaaatgtgagacctccaactttgttgttctttttcaaggttgttttctctattcagagttccttagatccatatgaatttcaagatggatttttctgtttctgcaaaaaatgctattgggatgttgatagggattgcattaagtccatagggttttgtagtattgacatcttaaaaattatgttttccagtccctgaacatgggaagtcttttcagttgtgtctttagtttctttcatcaggccgggcatggtggctcacgcctgtaatcccagcactttcggaggcctaggtgggcggatcacgaggtcaggagttccagaccagtctgaccaacatggtgaaaccccatgtctactgaaaatacaaaaattagccaggcatggtggtgtgcacctgtaatcccagctactcaggaggctgaggcaggagaatcacttgaacccaggaggcggaggttgcagtgacccgagatcgtgccgttgcactctagcctgggtgacagagtgagactctgtctcaaaaaaaaaaaaaaaaattctttcatcaaatgcttttgaagttaaagaatctgaaatcagtgctatttcaacatgtttagaagcaaaatttaatcttttatactttatggtcagctctctattgagaacactattacaaaggaacagaagtatgataatttaacaatagatattccaaaatagttcttaaaatagtggttttgtttttgtttttgttggaaatagagtcttgctctattgcccaggcttgagtgcagtggtgcaatcatagttcactgtgactttgaacacctaggctcaagtgaccctcctgcctactgagtagctaggactataggcatgcaccaccatgcctggctaatttaaaaaaaaaaaaatagaaaaaagtagagacaaggtctcactatgttgcccaggctggtctggaacttctggtctcaagtgatcctcctgccctggcctcccaaagtgctaggattataggtgtgagccaccatacctggccccaagatagtatttatatttgacttttaaatgtattatctaattcaatagtgagcccttcttaattatactttgcccttgtcttttttagtgtgaattggatctggatatagtgggttttaggctatgtttttaggagctgttgggttttaaggaggtgactctagtgcccaagggagcctattgggtagggctctagcactctcatccctacctcaaccagcacttttgtctgttagcataatgtgttccccgtaagattttatctgggtgaaggagtggggagggaaaagggattctatagcgaaaaccaccattgttttgtatattccctgggtagaggcagcccctatctgttgtgtgagaattggaagccagtttggaggaggaggaggatgatttgtgtaatttttgttaatccttttaaaatggttttaacgggcagtcctaaactactgcgaacagacctatgccatctatttcatttactttcctcaccttttcatttggaaacaatttaaactataggaaagttacaaaagtagtaaatgaatatccctatatcttgtacctagatttaaccagttttcagcatcttgctacatgttgcttctctcttcacatacatgaacacacattttcctttctgaactatttgaaagtaaattaaagtcatcatgatacttaagccataaaaacctcacttatcacccaaaaatagggacatttttctaattaaatataatactattgtcacatactgatgaaatttaaccttgatatgttttctaataaatagttttcatagactgaatgaatgactagaatgtccttcatagcaactcccttcccattgatctaggatccagtcaaggatcatttattttagttgccacgtgtattctcttgtcttctttaatctagagtagtcccgctttgcccattttgtctttagtgacattgacatttttgaagactccaagcaagtttcttgtagaatgtcctattttctgcatttgggcagtgatttcctgtctgtagatttgggtcaaatattttcgatagctatactttctatgtgatgctgtgtgtttcccaccatgtcacatcaggatgcctgtgatgtctgttggtctcattattgttggtgataagttgttcttcacctggttaaggtggtatccagcaggcctcttttttgtgaagtttcctttgttctttgtaaataagaataatcccattgagggaataatttaagacaaagtgaatattctgtttcccaaaaacctttcattcaatggtttaatggttcttgaatcacttattacattggtggttgcgatgaaatttatttatttatttatttatttatttatttatttttggaaacagagtctcgctcagtcgcccaggctggagtgcagtggcacaatctcggctccctggagtgcagtggcgcgatctcggagcttctcgggaagctccgcctcccaggttcacaccattctcctgcttcagcctcctgagtagctgggactacagctgcctgccactaagcctggctaatatttttgtatttttagtagagacgcagtttcgctgtgttagccaggatggtctcgatctcctgaccacgtgatccacccatctcagcctcccgaagtgctgggattacaggcgtgagccaccacacccggctgcaatgcagatttttaaaaaattaattattttatttttatttttaattgagatgaggtctcaccacgttgcccaggctggtctcgaactcctgggctaaagtgatcctcccaccttggcctcccaaagtgctgggattataggtgtgagccaccatgcccagccagaaatgctgatttttaattctctaatttcctctacatttattcactgatatttttccgttaaggtaaactttccattcccttcagcgatttttctgtatatatacacacacacatacatacatacacgtacattacatccatccatcctcttctttacagcagaatatcagcgtataaatgttgaggaaatgggagaattagaaaatcaccattttgtaatcatattaccaatttctacttttttcagatgatggaggaacacacagtgggctgtaagttcagtggtattgactgaggcccaaacagtgttgtgattgtcagaaatatgagaagtaagtggatggcatcttgtctcctacattttatgtagcctcttttgtttccttgtcctgcagggataccttgggaaaatgcttcttcctacgagtggaaattactctccgaggagctacgtataggatctcatttagtgacacagatcagttacctcctcctttccgaattgacaacttttctaaggtatcaagtggagctgagagccagtttgactgtttcatgtgtgggagggtggagtgtgtactgcccttgacacaatggtacaatacattttcaacttgggtttaaaggaaactatatggataggttctttatatctggacaagcctagaaatccttaccattaagaggtgttttctgctggttattttgattgctaggcagccttgtccaggcagaagtaatcttttagctcccagatttatttattttggctagagtggttggttgacactgtgccttctgtagacatcccgttcaaacagaggaagacatcggcttgtcagtgacaatgggaatgggcaattctgctgttgcttagttacagtgagcattttaataaatttttcaagaaagtcaatatggaaatcattagattttattttaattatgctttcaaataataataggtcttatatgtgatgatctgtagccaaattccaaaatacttatttttttctgtattcaaaatatatcatagggggtttgggctagaaagatgccattggaaggatggaattgctccccttagatatttgacttggcaaagcgtttaaagcctttcattcaataggatatatgtatatatgtgtgtgtgtatctgtgtgtgtgtgtgtgtgtgtgtgtagcacatgtcttttaattggtgagtttttttggaatgtgcaagatgattagaaacattcgaaaggtgagatgatgaatttcactggggcttatttcctgtgtaagattcatttaggaaggatttggaacttaaacctacaaagcactgactcacttttcagtaaccccactctgaatgaaagtcctctttgtcctctctgccatcactctaggtcccggttgtctttactcagcatggcgtagctgaacccaggctccggactgaagtgaagcccatgacttcattggattatgcctgggacgaacccaccttgccaccttttatcactctgactgttaaaggggcagggtcctctgagatcaactgcaacatgaatgatttccaggataatcggcagctttattatgaaaatttcatttacattgctgctacatatacattctctgggtaattcttgattaaattactgttcctataaagcagaaggttctaattattaacaggttttaaatgttaagcagtttcttaggagaccaaagtacaaaggaagattctttcattctttaccaaaccctgggctcagtgtctatcttaagaggtcatgtaatttaaactcttgacttttggctagattaaaatttatccaaagagtcaagacccttcttgtgttaaagatctctcccaagaattcattctagtatttaaattttctttttgctatttattagtctgttttgcctgtttcctcttttgaaactgactaatcttcatcataattattcaagtcatcattctgactctcctcccaccatcccattgagaatactggttaagcagacacctaagggtctgtcttaatattcacctaaagccaaatatagtagcttaatttcacagaaattccattgccttagaattataatcttcactgttgtttgactagttgtatttagaaaagtcagatgaagaatattgagcttattttaattctgttagattgccacgcagagattcaaaacactgggctttcagaaagtagtcattctaccaacatataaatatagcttattgtttctgtgctgaaataacagggccaattttaaagtgtatctgtgaagaaatggaaaatagcttaatctttaacattacaaatataaatcacctgatgaatagggcgtttaaagtcacattcctttccaaaatgttcggaacatttttgcatatgaataagatttttatacatgcctggggcccagaaaataatctctgggtttttgcattatctctctcatctgcttagagtccagatttcactagtaataattgaatctgcagagaaggaccattctttctttgtctgttgacgttccctttgggaacgatggtgctaggatgtttatcttgttgtaattgagtcaatatgtttgtttgttgttaatttgtttttaaagattatggcacttaacagtgggacatgcttaaggtttaatgcctgaaaaaccgaatctaaatctggttgttagtcatgtttttctccttatgttctataaattccagtagttactaagctctttaactgaagaatcctagtggaggattatgggcttaatgggttgaacctatatggaagacataaaaagagaagctcctggaatcttggtgtgcagaatctaacagcagaattagaataatcttgctgtgctaagaggttgaaccatcttttggagtatatcagatactaattatttgcattcttggaaggaataaatgatgaggaagaatagtttttttttaattttgtttttgaggtgaaacataacataaaagtattttaaagtgaacagttcagtggcatttggtacattcataatgttgtgccaccaccacctcttcgtagttcagagcatttttatcaccccgaaaagaaaccaaaacctattgagcagtcactccccattcctccctgtctccagccgcaggaaaccacccatctgcttttggtctctatgggttgacctattctggacattcacagaaatggaatcataggagtgatcttttttgtctggattctttcacttagcataatgtatctgcggtttatacacattgtagcatgtggcaatgcttcattctttttttttttttttttgagaccgagttttgctcttgtttcccaggctggagtgcagtggtgtgatcttggctcactgtaacctccacctcccgggttcaagcgattctcctgcctcagactcctgagtagctgggattacaggtgcatgccaccacgcctggctgatttttttgtatttttagtagagatgggatttcaccatgttggtcaggctggtctcgaactcctgacttcaggcgatccacccacctctgcctcccaaagtgctgggattacaggcttgagccactgctcctggcccattttttttatgaaaagtacccagtattttttgtggctgaatactatgctgtatactacatttttgtttatccagttatttgttgatggacatttggttgtttctgcgttttggctattgtaaacagtgttgctatgaacatgcctgtacatatatttgtttgagtacttgttttcaattcttttgctttatacagaagagtggagttgctgggttctattataattctaagtttaactttttgaggaaccgccatactgttttccacagtggctaaacgattgtacattcctaccaacagtgtagagaggttccaatttctccacatcctcaccaacatgtgttggtttttgtttttgtttttatttttatttctatttttgagacaaggtctctgtcacccaggctggagtgcagtggcacaatcttggcctgctgcatcctcaacctcctaggatcaaacggtcctcctgcttcagcctctctcatagctgggactacaggtatgcagcaccacgcccagctaattgaaaaaaaatttttttttggtagagacagggtctcactattttgcccaggctggtctcaaactcttgggcccaaatgctatctacctgccacagcctcccaaagtgctgggattacaggtgtgagtcactgtgccaggcctggttttgttttgttttgttttgttttaaatgatacccatcctactgggtatgatgtggtatctcattgtggcttttgatttgcatccttagtaactaatgatgttatgcgtcttttcatgtgcttattagtcatttgtgtatattatttggagaaagtgtattcaaatactttccatatttcaaatggaattatttacctttttattgttgaattgtcagagttcttcatatctggtctcttaccagatgtatgatttgcaatttttttctcccattatttttgtgagttttctttttacttttagattgtgtcctttcaagcacagaagtttctcattttggtcacatataatttatctgctttggggggaacaaagattacttgtgcttttggtgtcatgaagactagtttttaacgctgaattaatccattacctttttttttttttttttttgctaataagggttaatagaaagaggagaataatctaaataaaacttccaaacatccctaagtgtagccaggctgcaacattccataaagcttaggattctttagcttcagagaaacgtaacacgattgaattggaggaagttgattggaaccctttgttttcttttcatcctaaagggacttctgatttcttgccaagacttggggatgcagtgatgctgatcatctgcctggcagagtaaagctaatttttggtcccttgaattgtctggcttggtttttttttttttttttttttttttttgctttttttgggggttggggcagaatctcattctgtcacccaggctagagtgtagtggtgcagtctcagctcactgcaacctctgcctctcaggttcaagcaattctcatacctctgcctcgtgagtaactgggattacaggggcctgcctccatgcccggctaatttttgtgtttttaatagagacgggattttgccgtgttggtcaggctggtttcgaactcctggcttcagcagatccacctgccttggcctcccaaagtgctgggattacaggcaggagccaccgtgcctggccaaattttttgcctttttttttggtgggggggcctctaaagatatatggttatacttttgcatctgaattttaagtcactaaaattatgaagagaagaaaaatgtcagagtatgtcttctgagagatgaatcttggaactgtgtagggaaaaaaatgcaaccctgatctttctgctcttgcatcagactttttcttctatcctttaaaaaattttctttttaataaaagttttgggcatttgcttattaatacttgaatacatgtgtgagtatgtgtgtgtatacctgtatatatatttttatgtaatatatatattttttaaattctagcttgcaggagggaacaggcaggcctgtggcttccaacaaggccattacctgtgcggagctcgttttggatgtctcacccaagacacaaagagtcattttaaaaaagaaggtaagagagcttacaatcagagtttagaatacaaggtttttagcactggacgggactcaggatcacccagtgcagagtccttatttcatgatgaggccatagggacttgtgtggaacccaggcctcttggcatttccaggtcagtgttagggcggatgagtaccagctcaggagtaagatgacttctggagtgggatgtgatcaccaggtgtgatcagcagaacgtgaataataaatatatgtggaattactaagggctgggtgactgttaagcagacaagaacaaatttctaagattaagtagcaataattgtaacattttatataacattttataacttatagaacattttcagttattatttcacttgataaggatgacagctagtaaataggtaataaaagagttacattgacattgaaaattaggttaaagtgtatgaactggcatgaagaaatggacctctcctttttagttggaaaccaagtgtagaaagtttgacattttaggtttttgtttggtttgtttttgttttttttactttttatttggaaacaatctcagatttccagaaaattggcaagaattttaccaaagtggggctgtgatgttgatttgtccccttactggtgacattaacttattgcagttgattaagaaggtgtgtggtagccttttccactgagaagtgaggctactctttttctttttataatcagtcaagattttgtggcgtggtacgttgagactacataaacctcctatttgtcatattttctatatatgtatgcatatgtatatgtgtcattcagtatgggctgctgttttattcagcgtgttatctgttactgtgtcagtatgtgtatgcgtatgtatgtatgtatttatttatttttgagatggagtcttgctctgttgcctaggctggagtgcaatggcatgatctcagctcactacaacctctgcctcctgggttcaagtgattctcctgcctcagcctcccgagtagctgggactacaggagcccaccaccacacccaactaattcttgtatttttagtagagacggggtttcgccatgttggccaggctggtctggaactcctgacctcaggtaatccgcctgccttggcctccgaaagtgctgggattacaggcctgagccaccatgcccggccagtatttattttgatgctcagtttttcttatctttggccagtgggagctcctttaaccttccgtgtgctttcagcatgtgccctcactcacttccttactttctgacacagcaagttatcctgggtcaatcttatatttttccctgcaccattcctggaatttgccatttctccagggagccctcatcccttctatcagagaatggaatttagaaacctgagattcatgaattaggtgcagttgttgctattgtggtgttgtggttcccaggctctctcagaagacagacctagggttttttaatctatgtatgcacaaatatacatatgtgtgttttatgtacatatttatatactgtacatatttatttctatgtctacatatcaaaatctagcagttcacaccaatatttccaattcaagtccagtatgacaaagttcattctaattttctccctttccctatttgtacttcccttgtccagcactgagaatatgtttattgatttgatcagttcccctgaatgtaacagtgtaactcatcctccgtcaccacagttgtcccatgtcctgtatgaacaccctggtttcttcccttgggctctgatctccatgtactgggcagccctgccctcttcccaccctgtccttcgcaggaatgccctcctcacctccctctgtgatgctcccattaaacccctccccaacctcccaacttggcttcagcccctgctctgggctgccccatcgcttaggtggatgcctttcttgttccacatgcgctttaacaattccacactgggccaccccaacccccatccccaccacacacacaagccccatggagttctgccttccacagtcccatctaaagattttagaactaaattattagggaagggaggaagggaactggaaggagaatggtgcatctcagattttcaagtggaaattttggtagtttccaaattatgatgagcctggacaaatgggcaggcagtagaggaatcccagtatggaaacttgatctcacctgggtatgtctgtgttgattcccagtctgcagcatctacaggataaccgagatgcttttcctgttgtttctggtgctgtgcagagatgctttctgtttctgtgaacagagaagcaagcatgtgggaattggagatgggaagcacagcttagcttcatctctttttgcagacagaggaggcagtagcacacagcagagacagcatgatgtgtttttaggtttgagttctggctttgccacttaaagatatatagtatctggtatttcccatttctctcagtttcatttttcaactgacctcccagatttgctggaaggattagctaagataatgtacataaagtgctctgtaaagagatgtaatgataataacacaacaaacatttattgaggctctaccctgtgccaggcatgtactaataagcgtgttacatttattacacttatcacaaaaaccatgaggcaatttttctcgttgacagatcaggaaacggaggctctaagagattaagtaacttgtccaaggtcattcagcttgtaaattgtgtagctggatctcagatcctggcattttgactccaatgttcatgctactttgttagtttttaccttgtagaatgtgataaaaagctatctgtccggccaggggtagcatgtaaatgagtttgtggtaccctgatgtgtctgatgctctggaggagttcctgcctagtgggagtgtatgtgatcctggcagatctagctggagtgtaggtgtgactgaaaaggaatgatacagattgtgctagagaggcaacatagcagagcagttaagcgtgctgactctggaatcaggctgcagagattcacatgttggacctaccatctaactagttatttcactgtggggaagttacttcatctcaccgagccttaacttcctcatctatgaggagggacatatgtcactggattgtttgcagcagtaaatgagtttttttctttttttctttctttttttttttttgagacggagtttcgctcttgttccccaggctagagtgcaatggcgcaatcttggctcactgcaacctctgcctcctggtttcaagtgattctcctgcctcagtttcccgagtagctgggattacaggcatgcgccaccacgcccagctaatttttgtatttttagtagagacggggtttcaccatgttggccaggctggtcttgaactcctgacctcaggtgatacacctgcctcggcctcccaaagtgcttggattacaggcatgagccaccacgcccggcctaaatgagttgttttatgtaagtcttatggaccaatgtctagcgcatagtaagttctcagtaagtattatgacttctagtatataatggattatatagactttcatgattgacctggaagcccaactgctgtttccaaaatatttctaaagagaaaatatatttagaactagcaatctggccaggcacggtagctcatgcctttaatcccagcactttgggaggccgaggcagacagatcacctgagggcaggagtttgagaccagcctggccaacatggcgaaaccctgtctctactaaaaatacaaaaatcagccaggcgtgatggtgcatgcctgtaatcccagctactcgggaggctgaggcaggagaattcgcctgaacccaggaggagagattgtagtgagccgagatcgcactatttcactccagcctggagaacaggagcgaaactccatcccaaaaaaaaaaaaaaaaaaaagaattactagcaatcaattagcataaccttgaatacaaccaacttaacacttgtgatacaatcaattcatgaaaattggacaccatcaatatagtacgctttccttataaacattcgggacggggaggaagacctctggtaaattctgattcaaagtcagatattgagcatatcgtatagtctttatgtaattgcactcttctttaaggtaagggcaccggacggtcatcatctggaatggcagtgatcatggcagtatagctagtgtaggaggctgccccgccatttgtttctaatttctaaaaaaggaaaaaaactcggttatgaaaataatacgtttgttaaaatgcacattatttgtaatgtttggttgtttggttcaagaggttagcatattttaccctaagaacaacaaaagatagataaccatgaaagtttgaattaagcatttatataatgtggaaaacgtctaaataaacttcctatatgagaacttatttagccctagaggaagctcttgaagtgaggagctagctgtggctgcccataatggctctttctctttttgcttgtacctacttaacaggaaccaggaaagcgttctcagctgtggaggatgacaggaacaggaatgctggcccatgagggctcctcagttcctcacaatcccaataagccctcagccgcccgctccaccgaggggtctgccatcttagatattgctggtctcgctgcagtgactgacaacaggtaattttctaggcaacttttgattcaagctcattgctttcaaattcagactcagaggaaatctacaacaaaaactaagagttctataaataaagtaaaaatgtatatttttttcaatgacaaaaacctgtcatattcccaaatatgagtattgggctttccctttaaatattttaagctttgatgaaatacccatgcagatgttaagaaacttcaaacaataaaatgggtataatgtgaaaagtgattatttcttccacccaaattccagtccgtccttattctgaggaagtagtttcttttttacatcttcctaataactttgtcaaatccttcaaaagcagaaattaattattaagagaataatcagatgtatttttatgaataaatccttggattcaaattagctctttaagtttgaataagttacttgatttgcctgtgccttagtttctccataaaaatcagtgtgttttcagttaataccttatttccagaaaaactttagttgacttacaagttagaacagaaaagaatttagaaatacaacagaaaaaagactgttggaaagattttacatgtatttagcagctattccttccatactgcatggtaagttgccgttttgagaatgcaagaagccatattactgtgtgttatgaaatctttaatgtcttactttgtgtcccctcttcatgtttttccattttgctttattcctcttttcttatcaagagatacctaactgccctaggattcaagctaactacccattcagttttaagggtggagggcattagaaggaagaagagcaaagccatcatcctcatgttcccttcaggcgtgaaacagttgactcggaggtttcatggttcattgtgtattccgttttccagatacgagccactgatgctgagaaagcctgaccgcaggcgaagcacaactcagacgtggagtttccgagaaggaaaactgacctgtgggttacatgggttggtcgtccaggtcagtcgtttttgatccccaattgcagcaagcagtggttgagccttctttgaaacaaagtctctactaagttatacatgatgaattgttcagtgggaaaactagttacagagcaatacttattctattccattttagttaaaaggaagtcagagttttgttgtgcatttgtgtatttttttttttttttgaggtggagtcttgctctgtcgctcaggctggagtgcagtggcacaatctcggctcactgcaagctccgcctcccgggttcacgccattctccttcctcagcctcccgagtagctgggactacaggtgcccgccaccacgcccggctaattttttgtattttttagtagagatggagtttcaccatgttagccaggatggtctcgatctcctaacctcgttatccacccgccttggcctcccaaagtgctgggattacaggcgtgagccaccgcgcccagccccgcatttgtgtatgtttacatgggaaaagttcttggagatggtatgcaatacatgtgttaagagtgattgccctggatgataagatatgtttttcatggcttacctggactttttctttgatgtcatatattaccaatgtaattttaaaaagaaaaaaattacctatgtaattttaaaaagaaaaaaattacctatgtaattttaaaagtccagcactaagttagatgaattagatttagacctgggaagttaatggcatagctgcaagtcctctgtaaagggttctatgacatggtgagcattcgccaggcatctacatgctcttgattctgttcattttggcctaaataagcattgaattgctgtagcaaatgtcagaatgaagattgctggacagtttcctcctcagccagtctacctcatgataaactcccagctactttctaagcaaatatgtgtttggcaaattaccaagggtttggattttctgccctttctggcttcaggctgggaatgagaacaggggtctgagaagtaggaaggtgtctaggaggtttggacatgcagtagactagcacctgcaattgtgtgtgcagttctgtccagcctgggattttacacaaaagggaaacaggagactatcagactcttgatagagaactctgagtgtacttagattgtactccagggcagtttgcaaaaactgtaaggagcctctgactgcttttggtgagatttattttctttatctctatcgccctgagcttttttcatcaaagacaagctgcttacttatatgtagcacacatctggaatggatttgtgattttcaattagcaatacaattcaaacttctagaggcaaagagggcttgttataattggtgggtttcatgtctgaccctgacttcacttctagtttgtttctaaagcccatgtaattccaatgctcttggagcattttcttccttaaaatctttttttggtgtttgttgttttgtgaatctatttcatcatttccctgcttgttagtgacagtataataacagtattcagcagagcagaatgtgttttggttagggaagtaagcttgtttcaatcttattatgctgaataaagtcattgaagacattaaaacattttctgacactgctcttattaggttgtatatgctctttctttctaaacttataatagctataaaaagctttctttgtgttgaaacctgtactataaaccctgctcaaagtttgcttttcatgagtcaatatttaaaagttaacaaaggggatttagacactctttgccattgtcttctctagccttgtgtttgctttcccacagccataatcctgtagactcgatttacttggggcatgtagcaaggtgttttcctccaaaggccttgttaaagcaaactaaatatggcctgagaaggactccgtacttctataattgaatccctgtggaccaactgtaacctagagtaatcggcaggcaagattgaaatccttacttaggagtatgtgcctgtaacaatagctgagacttggccagtcacagcagccatacttccaccactcacagatggctgagtgttcagactgtgttcaaataaggcagacgccaacctgtaaccaatccagctgtttacttccaacttctgtacatcacttccctttctttgtctataaatttgttctgaccacgaggcatccctggagtctctctgaatctgctgtgattctggaggctgcctgatttgtgaattgttcattgctcaattaaacccctttaaatttaattcggctgaagtcagtcagtctgtctttttttctttttctttcttttcttttcttttctttctttctttctttctttctttctttctttctttctttctttctttctttctttctctctctctctctccttccttcctttcttccttccttccttcctttctttctctttctttctttctttcttccctttcttctctctctttctttctttttctttctttctttttccttttcctcttttcttttcttttgacaaagtgtcgctcttgttgcccgggctggagtacaatagcacaatctcagttcactgcaacctccgcctcccgggctcaagcgattctcctgcctcagcctcctgagtagctgggattacagttgcctgcaaccatgcctggctaatttttgtatttttagtagagatagggtttcaccatgttgaccaggctggtctcaaactcctgacctcagatgattcgcccgccttggcctcccgaagtgctgggattacaggctgagccacctcgcctggcttgaagtttttcttttaacagcctgaataactgggtatcaggtgacattctcaactctgtattccattctagaagaaacaccatcttttgagtatttggattggttgtccagccataggcctgtttggggaggttttcaactcaagaattttcctcttactggaaagctgaatgattataataattattttctattttcagaatatttcagatttttaagcaaaccctagtaagaatactcaaagaaacagctagttttggctacttttttagaagtttattttaatgacaagaagttagtactagtaaaaggcagaattaaactgatctatgcatgaaattatctcttattcataattaccaaaatttatgagcataacttttcatcttactgaagtaattctcctgtttttcatcatctgcaaagctgaacaaatagtaaaggctttgttgcacattgatcatgaccctccagaggagaatgtaaatttaggaacttgtttgaaatgatgtgttaacttgtcaaagtcagtgcctctgtcttttctcacatgtctctactccaatgtcttttaggccaaaggaggactttctggtttgtttgatggagctgaagttgttcttggtcctgacacttccatggagcttttggggccagttccacctgaacaacaatttattaatcaaaaaatgagacctggttctggaatgttatccatcagagtcatcccagatggaccaactagagcactccaggtgataatttgtcataagagctgatgtgaaactctgtacttcctccacccccaatgattactcatttaacaaatacttattgaacatgtttatgccagatatgaagatatggtatcttcatctgtaaaatggggataggatctacctcacaaagttgttacaagaactaaagtacaacaaaaagataagcgtaaagtataaacaaagtatcaatgaaatatgtggtaacctaaaaaagtataagatttaaacaagataatgttaacagtgcatattaatagtgttgttaattattattaataacataatatcttaataacattaacaacaagaagatatgagatccttaatcagataattaaaatattgtgttaatgagagtaggagtggagggtgtatggaaaggatttgtattcccagatttagagggtggggagcttcctaagagaagtagtacttaaactgagacctagagtttaactgaaaggaattagccaaatagaaaggtacaggtggaggggctgtgccctcagtaataagcatgttcatcaacaggtatttactgagcagctacttgagccagcacaggtctaggtacggaacatttaccagtgaacggacaaaactccctgccttcttggagcttacattctagtggggatggaccatcattgaccaataaacataggaagtaaatgacatacgatgtggaagttgactagtgaaggcccacaggtagcagagtgatcctcagcccaagtggcacacagaatgtggtaagaaagaaggctggagatagaagcaggggccagatcataaaaagtctgagatacatactaaagaatttgtggtttttctaaggcaacaaggagtcagggaatggcatgattagaaaattgttttagatcacttcctctggctgcaatgtagagaagcagagtggggcaagactggagatagtgaaataccaggtaggaggctcttgcactaatgtaaatgaagggttatggtggcctgaactggaagaagtggcaggggtggacatgaggaggctggagagaaatggatagaaatgagagcttacttaggagtagagtcaggcagattttgtgactgaatgtgggaatgagggagaggaaggagtcagtaatggcctccaaggttctgatttgggcaactcacaggatgataatccagatcactaagggatgaacatggagcagacttgcagaggaagggaggagttaggttttggacttgttgagttaaggtaactgtgtgatatctatgtgaagatgtccataagtcattgtaactatggctctgaaacccaggggagagatctgtgatggggataagggtttattaggtcatagcgtaatcagaacaaaggaaaaaaaagatgttggaatgtagcaatgagctctctgagatagtgcatcacaattcacaacaccactttttatttatttatttatttatttagctatgtcactctctttcacctaggctggagggaagtggcaaaatcatagctcattatagcctcgaactcctgggctcaggtgatcctcccacctcagcctcccgaatagctggaacttaagtgcatgccaccatgcttagctaattacttttcattttttgtggagatagggtctcgctatgttccccaggctggtcttgaacttctgggatcaagcgatcttcccaccttagcctcgcaagtagcttggactacaggtgtgtgccactgtgccggctcacaataccactttaaaaaacaatcttaaggcaaaaatgaatgcagtgatcttgaggtttgcatattttgacttgagctataatttgagatcatctgcagatatctaaccccactacgtgaggctctcaaggtgtatagcttgagtttgccatgcagacttgaaaccaagtttgcttctttattacacaaatcttaccttaccagtgctttggaaaccattcgcttccataggattattgattatataatgacttttgacctacacagttgttctgggttagaataggtttcaataaggaagagtgaatcatcttcttgtggtgttttatttgacttcagataacagatttctgccaccggaaaagcagccgttcatatgaagtggatgaacttcctgtcaccgaacaagagctgcagaaattaaagaatccagatacagagcaggaattggaagtaaggtctaaatattgtgaatttatttatttgatcatcagttttttagaattttacttggtggtattttagaccttctgttttctttctatcctgtatgattctaaatatgagttacgcttcacagtgtttactgtttatcagtgaatgtgtgaatgtattatgtaaatgacaacaaagtttatgtggaatcagcatgtagtaagcattgctaaactattattacaataaaggaagctaaattgtttgaatttcagtaagatttaagacaaacaattttttgttttttgcttcagccatctctgacatcttccttctgttttctctgtttgggattggagagtgacaagtttgaaaaggaagatgagatgaacatgaaaaagtatatttatctgacgtttattcagtgatttttgaaaaaatcaaatgcctatgtgtaaaacactgtgttgggtgctatggaagtgtagtggataacagattatgagctttcatcccaaataaggtgaaagattaccaaataattagatttctataatgaaatgcagaatgtcatcagtcctttgatagaggtatcatcacatactctggagttctcgttggggtgaagggtatgcctagaaagcaaggcttccagtgagatgatagcatttgagccctccaggtaaataataggactcccctaagtggttttcatctgctgagagatcgggagtagaggaatgtaaaatgctttattttcttatactctcctggatactgtgagctgtgtttaaaacaatcagggtgccatattttggtttcctttcaggtgcttgtgaggttagaaggtggaattgggttgtccttaattaataaagtcccagaagaactggtctttgcaagtcttacaggaatcaatgtgcactatacacagctggcaaccagtcacatgcttgaactcagcatacaggatgtacaggtaagggggaagttccaaagctgttagtcaccttgttttcatgctgatcacccaaccagatctaatgtttgatgttctaagaactttaatgttttggaggaaatatcttgtggccttcaaaaaatcattctgtgaaatagttgtttctacctacattcgtctcattaatttttctacatacagcagaattctgcatatattagaggtaactcagtcagggtgtcatggaggaaggtgacccatggttcaccatcttgccaatagaaaaaccaataggaagtcatctaaccatcattcggagggattgaggtctgtcatagggagaacaaactaaagaactggactttgctttcagtcaagatggagtaacagggactaaatttaccctcccacctgaaacaaccccagaatccagataaataagaagacaatggtattgagacactggacatcagacaatgaaggacagtgctttgacaggtgggaaacaaacgagctgagccctgtaattgcctttcttaccaatttgagaacgtttccagggaggggagaccaagcaagtacccagcacagtggagaagttgagaaaacagagctgagagtctagagagaccaaggtatctatagttataggatggtacacttgggcatagagagctgcacagaaaaactctgaagatctatagaccgtccctcttgagtatttagccaagtattagtcagtgatgtatgtgaggaaactacccatctgaaaggatcagagggaacagtgcctgctgcccacacagggctaggaatagtgcttgtgcccaccagctggactggaaaaactaagaatttatgagacgttgggaagagtctcaggaaagccttgccctcatgattaattagccctaaactgagcactgctatagactgcctaagaaatcataaaaggaagatccgaaagaatcaacctcttcccaagtaaattaaccatatccttgaataaagctcaagaagattattggaatatgacaatttagcacccaacaaggtaaaattcacaatatctgacatcctatcaaaaattaccaggtgtgcaaaggagtaggaaaactttctatataatgaggagactaattggtcaaaactgattcacaactggcacagatgttagaatttttggaggacgttaaaactgttaatgtaactgtattctctgtgttcaaaaggttaagtagggagactaattggtcaaaactgattcacaactggcacagatgttagaatttttggaggacgttaaaactgttaatgtaactgtattctctgtgttcaaaaggttaagtagcaatatggaagacataaaaaaactaaagcttgtagagattaaaatgtaatgaaaactacactggatggaatatagcacacaactgtgaaggaaactataccaaggcacatcataatcaaattactcaaaaccagtgttaaagcaaaggaacaagaaaaaaaagacatgctatgtgccaaggaataaagataagaatgacaacagatttctttttgggaacaatgagagtgggaagacaatgagcaacatctttaaagtactgaaaggtatcagcagacccatgctacaaaaaatgtaaaagaacatcatcaggcagaaggaaaaaaatagtatcagattgaagtctgttctacacaaagtaatgaataccagaaatgataactacctgggtaaatatataagattattttcttcttatttaaagtaagagtgagattcttatcaacaatagcataaaggctgaaggggagaaatggaagtctattagtgtaatcttatacatgatgtggtatgatgtcacttgaatgtagaattataaagataaacagcataaactcttaaagcaaccaccaaaataacaaagagttataactaataattcagcaaaggagataaaatgaaattaggccaggtgaggtggctcacgcctgtaatcccagcactttgggaagctaaggcaggtggatcacttgaggtcaggagttcgggaccagcctggccaacgtggtgaaaccccatctctactaaaaatacaaaattagccaggtgtggtggcacacacctgtaatcccagttactcgggaggctgagacaggagaattgctggaacctaggaggtggaggttgcattgagccaagattgtgccactgcactccagcatggtgacagatggagactcttgtctcagggggaaaaaaaaaaaaaagaaatcataaaaaaataatccaagagaaggcagaaaacagaaagcagggaaaggaatagataggacaaataaaaaataattagcaagatggtagactcaaacctaatggtatcaattaactaaatttaaatgttgtaaacaccgtaatcaaaaggcagagattatcaaattgtataaaaaagcaagaaccaattatatgttgcctacaagaaacacacattaaggataaagacacaaataggttaaaaggaaagaagatgaaaaaagatataacatgttgacccttgtcataggaaatgagaatgactagattaacatcagacggaatagatttcaaagtaaagaatattactggtgtagtcggggttctcttagagggacagaactaaaaggatatgtatataagtattaacttacatgatcacaagttcccacaataggctgtctgcaagctgaggagcaaggagaaccagtccgagtcccaaaactgaagaacttggagtccaatgttcaagggcagaaagcatccagcatgggagaaagatgtaggctgggagggtaggcctgtctcacatgtttctgcctgctttatatttgctggcagctgattagattgcacccaccagattaagggtggatctgcctttcccagcccactgactcaaatgttaatcttttttggcagcaccctcacagacacacccaggatcaatactttgtatccttcaatccaatcaagttgacactcagtattaaccatcacaagtccaccctttgtcaactgccgagattataaggtcataattacacctaacataatacagccatccttcgtacagctggaaacacaccagtccccaacccaaatactattacataaagttaatgatgcttgaatgctgatatgaagtcaataaatctatgtcacataatgaaggagaaaggaaataaaatgaagatattttcttagtacaagtgtatacatgcacaaacatgtttttaacaaaagaaagaggaaatactcatgacaattgcagtccttgtttctgcagctggtcatgtggtcatagctagtattgatgattaccctttctactacccattctgtattccctttaccttcagcaagcacctcatcaggtcatggttttgtgggattttttcctggtggagtgacccaaaccttccttcctgaggggtctggaccatttgtagtcctgcctggattgggctgttgtagtttcccattgccttaatcacagggcatggtaatcctaagagatgccctaatggatctcctgtattccatgcataatcttccttacctccattgtggagtagtagactgatttcatcttgataatctgggtcagtcaccccagccaacactgtaactcccttcttagcctcttgacctaaagttaggcggagcccaaagtgtccaggtggtaatcttaacttccagtttaatggaatcattgttttgtctcctggtggcagtgttcctccctctggaactaagacctctaagccaggagaactaatgttgcaggaacagaaagcaaaaattttgctagtggatcattaggggtgatgatgaatggtgccacttcctcttccacccattgattcctggacctctgaatcctggccatgggagaaacagtaccatatattggatgctgattcagagcatacatagccttctggagaactttgccccagctattatcatctagttggcattgtaattgtgatttcaaaaggccatttcaccattctatcaatccagctgcttcaggatgatgaggaacatggtaagaccagtgaattccatgagcatgagtccactgccgcacttctttagccgtaaggtgagtgccttggtcagaggcaatgctgtgtggaataccatgacagtggataaggcattccatgagtccacagaggtagtcttggcagaagcattgcatgcaggataggcaaacccgtatctggagtaagcgtctattccagtgaagacaaactctgccctttccatgatggaagaggtacaatataatcaacctgccaccaggtagctggctgatcacccagaagaatggtgccatatcgagggctcagtgttggtctctgctgctggcaaattgggcattaagcactggctgtagacagggcagccttggggagtggaagtccatgttgctgagcccatgcataacctccatccctgccaccatggccactttgttcatagtcccagtgggcgatggcaggagtggctggggaaagaggccgagtggtgtccacagaacaggtcatcctatccacttagttgttaaaatcctcctctgctgaggtcacccattggtgagcactcacatgggatacaagtatcttcagtttttgaccactcagagaggtccatccacatacctattcccaaatttctttgtcaccagttttctaatcatgctcttccaagtccctgaccatccatccagccaaatcattggctacctcccatgaatcagtatataatcacacatctggccatttcttcttccatgcaaagtgcatgaccagatgcactgctcgaagttctgctctctgggaagattttccttaactgctgtccttcggggatgtcctagaaaggggctgtagtgctgcagctgtccacttttgggtggtgcctgcatatcgtgcagaaccatttgtgaaccaggctctagtcttcccttcctctgtcaattgatcatggggaattccccatgaagccatcagtgcaggctaggggagagaaggcagggtggcaggagtggagaccataggcatttgagccacttcctcatgtaacttacttgtgccttcaggacctgctcgagcccaatcacatatataccacttcatttgatgatggaatgctgctgtgtacgacccactttatggctagatgggtgggtcagaaagcacccagttcagtttgcaggtgtgcaccaccacatgcagctaatttatatattttttggtagagatggggtttcaccacgttggccagcctgatctctgactcctgacctcaagtgatttgcccacttcagcctttgtttttatttttaatttgtaaataaaatctttcatttgggtaactgtaaatctatgtgatcaaacaaaacatcttattttattttattgctttttacagctagttaagtgaagcagtggggataaacacttttactcccaaaagatgttttgtgttttttttaaatattttttttgagacaagaatcttgctctgtcacccaggctggagtgcagtggtcctccctcgggtcactgcaacctcctcctcctgggctcaagtgatcctcccacgtcagcctcccaagtagctgagaatacaagtgtgtggtgccacacttggctgatttttgtattttttgtggagacagggatcttgccgtgttggccaggctggtcttgaactcttggactcgagccatctgcccgcctaggcctcccagggtcctgggattataggtgtgagccactgcatccaacccaaaaatgttatttttcttttgccataaatgactatattaagatccttggctgggcccggtggctcacacctgtagtctcagcactttgggaggccaaggcgggcagatggcctgaggtcaggagtttggccaacatggtgaaactccatctctattaaaaatgcaaagattatccgggcagtggcgggtgcctgtggtctcagctacttcggaggctgagacaggagaatcgcttggacctgggaggtggaggttgcagtgagccgagaccactcctttacactccagcctgggcaacaagagcaagactctctcaaaaaaaaaaagtccgtgatgaaattttaagaaattcttgattaaaataatattattgtataaatgttaaaaaaaaaaaaaaagaaagcacacagttcaggatgggcagttcaggttgcgtggtgacttgatgacccatagtcagatgttcattttccaccaaagcccagtaacaggccaagagctgtctctcaaaaggacagtagttatctgcagaagatggcagggccttcctccaaaatcctagaggcctctgctgtgattcacctatgggggcctgccaaaggctccaaacagcatccctatctgccactgacacctcaagcaccattggatctgctgggtcatatggcccagatggcagagcagcttgcacagcagcctggacctgttgcagagtcttctcccattctggacccctcaaaactggcagcctttcgggtcacttaataaatgggccggagtaatacacccaaatgaggaatgtgttgcctccaaaatccaaataggcccactaggcattgtaactctttcttggttgtaggagggaccaaacgcagcaacaccgttaacttagaaggaatgtcttggcaggccacacaccactagatccctagaaattttgctgaggtagaagttccctgaattttagtcggatttatttcctatcctctggcacgcaaatgtctcaccaataagtccagtgtgtttgctacttcttgctcactggatccaatctgcataatgtcatcagtgtaatggaccagtgtgatattttgcggaagcaaaaagcaatcaaggtctctccaaataagattatgacacaaacctggagagttgatatacccctgcggttaggacagtaaaggtatattgctagctttgccagctgaaggcaaattgcttctggtaggccttgtggacaggaatggagaaaaaggcatttgccaagtcagtggctgcataccaggtaccaggagatgtgttaatttgctcaagcaatgaaaccccacatctggtacagcagctgcaattggagtcaccatttggttaagcttacgataatccactgttattctccaagatccatctgtcttctgcacgggccaaatggaagagttgaacaaggatgtggtgggaatcaccacccctgcatctttcaagtggcactaatctccacaatccctccagggatgtgatactgtttttggtttactatttttctaggtagaggcagctctaagggcttccatttggcctttcccaccatactagccctcaccctaccagtcaaggagccaatgtgggggttctgccagctgttaagtatatctatgccaattatgcattctggcactggtgacatgaccacaggatgagtctggggacccactggacccactgtaagtcagacctgagctaaaactccattaattacttgacctccataagcccctactttaactggagggcaacaatgacattttgggtcccctgaaatcaacgtcagctcagagccagtgtcctgtatccgcgaaatgtctgatcctttccctttccccagtgcacagttaccctggtaaaaggctggaggtctccttgggaaggatgggagaaagattcactgcgtaaattgtcggcaatgtagtggggtccttcctcaaggggatccggcctccccttcattcaaggggttctgggtctgtaaactggctcaagtctagaaattgactgaggggccatgattctctgtttttataattcaaactagttttttgtccattcaacctagaagttttctgcttgtataaattaagtaggaatgcagcaggcttcctattaatttcgcttctaggaacaccatgattaattagccagtgccagagctctacatgagtcagactattctgattgccactttgcctctgctgtgcattatggtagctatgcccaccttgcctttgacgattgagtgctgccacttggcaacctgccacctcgggatccagttatccccattgtgtttaaattttgtagctaatgattgctgttcccaccgttagatctgacatacagagaaaagcaattacagggctcttcaaagatgcaggtgctgcccttacaaatctgttccgcaaggcattggtcaaggatatatcttctggaccctcccagctgggatgagtaggtctgaagtggctaatccactccaccatcccagtctccctaatcctttggatcccttcctgtacgttaaaccaaaggagatcacacatttccacctctctcacggtgggccatcttttaatccatatttcagctaaccaagtaaataaactattagaaccttttttacctctccaagctgcaacattaaaagcagaatgcctacttagtgggcccagatcaataaatcctgatccaaccctatgttccttccactattatcccatacccttaatatccattcccgtatctgttctccagatttctttctatataaattagagaactcaaacagttcttttcgagtgtagtacacctcctcgtgagtcacactctcaacctcacatctaggggcctgccgggactttaggtctagaagcaaacaggggtgttgggggtgactcctgaggagaatcaacattactttgcctggcagctgcctcaagagaggtcatcactgttgccttaggcagcataggattcatctcctcagacaaaggtggaaagctgatgacagcatgggttgaggagatgttgccactactggggatggggaagctcatccttctggcaaaaaaggctcatcagagtttacaaactcagtttccccgagtttcatcagggtcctcccacacatccccattccaagttgcagggtcccattcttttccaatcattgccctcactttaacagcagacatctggtgaggctgtgtgtgcatctttcggcgtgcatctttcattgcaggtcagccacttgcatgacaagagcttgtgtctgtttttccacaatttcagctctttctctgcaggagataagactctcacttagggcaatcttagcagatttgaggctcagtatctgcttctgaagctgggagacagaatccctgagttcatcattttctttcattactttgtccactgaacttaggagcaaccaaccagcttcattatgttacttggttttctacatatggtcaaaggtattatgtatagagtcactaaaatccttgcctctcatgagcggtgaatcaggagtgtcaaatgcatttattttgcataattctccaaacggttcacgccaaggactatcagcattctccatactattagaggtagagtccttagcaattttttggggggctaatcatattcagcagccaactccagaaaccccaaagccaatgaaagaactccatccttaatattctgttcctctagaaccacacctggtaccaaaatctgtattagtcagggttctcttagagggatagaactaataggagatatatatatatatatatatatatatatatatatagttctttaagatcaataaaattaataagcctctaaccagtctgagcaggagaaaaagagaagacatagattattaatatcaggaaagagagagatgccagacaagccaaatactgacaagtctggggatgggactcctgggggagctgcaaattccttctggctgctggagtgtctgctaggactgctttgtttgcagtgtgactgtagggccgttggttttcaaggctactgtggagctggggtaggggtgaagagaataggacaaattaaaatgccacagagctcgctgttctcactgagtttcagcttgttttcttgagtaaatgctccttagattgtcgcaagttttttattaactttcggagttctgaaaaagtcgacctttacaatttttggcagagtactgttagtgtgctatcagaacaacttctatctgtttgtaacatcatacttggaacgcttttcctttataagcttcatcaaagtttaaatatgttcaggaaactagttcctggtagacatttccagaagaagaatccaaagccccagactgtggttctttttcccaaatggacgaactacatccttactgggagtgtgtgcaatgtgtctcccatgactggggctccttctctcccttaacatgtcatgcgattccatccagattgtcgaggccagaacctcttttcagaagaaatttttcttttattatatatcacgaataacagagaattcaggctaatcgtatcctatttatttgtgcacagatagaaagttaatatcttgcagctatttttccttgtcctccttttttcgaccttacagagacaattcaaggaaccatttgctgttcattagtttccttaactttattctttactttaaaaagttgtttgtttgtttatttgtttgtttattttgagatggagtctcactctgtcgcccaggctggagtgcagtggtacgatctctgcttactgcaacctccgcctcccaggttcaagtgatcctccagcttcagcctcccaaatagatgggattacaggtgcccgccaccacgcccagcaattttcgtagtttttagtagagatggggtttcgccatgttggccaggctggtcttgaactcctgacctcaggtgatctgcacaccttggcctcgcagagtgctgggattacaggcgtgagccaccacgcctggccaaaaagttgttttttcctataatacctctttatgtgatgtatgctgcaaatcatagaaaataatcaggtttgtactttactgtggttacagtgctgcaagaaggaatttttaaaaatagaaaatagagatcctctccttaggcagcatccgatctaattaggagaataaaactaggtagagttagtaattctcagttacgacgccttgtgtcagatgtgtttagtgaaagaacaaaggagaagacaatatggtcgagccctttattgccatttcatatttggatgagataggtaatgattcattcattcagtccattcttactgagcatcaagtgtgtgcccgacactgtactaggttctggagatatggctatgacttcaaaaatgcaggctttgctcttgagccaacagcctagagagaaagtctgccaataaatatgcaggcaggcaagcaaatgaataatgacattctgtgataactgctgtaaagaatagctactttagataaagtgctactttagaaaaagtggctcaggaagatcttcctgaggaaatgagagctgaactgaaacttggaggaatagaatgagcaaaccatagagatggtcactagaaaccatttcaggcaattcagagaccctgaggaaggaaggacttgcccacattttagaaacaataaggaggctcaggtgaggatggtagggaacctgaaagagtggtgtgtgatgaagctggagaatttggtgccagttcatgcaggccttagaggctgtggtgagaagtctggtttatcctaagagaaagggaaaccactgaatagtgtaaaggaagggtgtgtatgactcgatttatagtttactgaaagatcactttggctgctatatagagaatacattgtaggaggaaggaatggaagtaggaaaaaatactccaagtctcttgcccttatccctgccctgagaacaaacagaagaaaagtcatttccagttgtacagaaatgtctatttggaaatccctgcaatacaatggagaggtcagaggattcggtgccagaaatctctgcatttgtatcccacctcttccacttacaagctgtgcgaatgagggcaagtagtttaacttttttttcttttttttttttttgagacggagtctcgttctgttgccaacataatttaacttcattaagcttctgtctacttgtttgtaaaatgaggaggaataatacctagcctttaggggtttaggaagtgatatgatagggggtgtgtggaaagtacctgcagatggtctcttaggggtacccaaaaagatggtctgtcctctttcctcttcctggtggtgaacttcgatgtgagacagaacaggaagatggctgcttcctgcaaggagcctctagacatccatgcatgtctgagtgtggcaagtgtcctctgtgatggcactgatactgatcagggctgtgtaaatagagtcaaccctaatgccgctgacttaatcgtttcgttcccgagaagggagttgaccttagtagaggaaactgttacaatttggtagccatttgagctcctggttctctaatttaaattgtcttgaaggaatttggagcaagagagaagcatcgatagcatagtgtttaggagtgctggccttggggtcagacagaccgagattcaagttctagttttgccactgaccagcagtgtgacctgaagcaagggcctctcttctcagcttcttcctctgtgatataaggacagagctcatgaagttgtcataaggatggcagcaaacccttagtttaaccaccagcgttacaggtatgatgtgacttgggatcatgcatatgaagtggctagcatggagcttcgcacatagtatcacctgttttatttttttaattaaattttttgtttcattcagcaggttgtggacttaaaaaattacttttttcaaatagttgattttttttttttttttgagacggagtctctctctgtcacccaggctggagtgcagtggcgctatctcggctcactgcaacctctgcttcctgggttcaagtgattctcctgcctcagcctcctgagtagctgggattacaggggcccacgaccacgtccagctaatttttgtatttgtagtagagacggggtttcatcatgttggccaggctggtctcaaactcctgacctcgtgatccgcctgccgcaacctcccaaagtgctgggattacaggtgtgagccactgcgcctggccagtagttgattttttaaccaatgaataaaaattgtgtatagttggctgagtgcggtggctcacgcctgtaatcccagccctttgggaggccaaggtgggcagatcacctgaggtcaggagttcaagaccaacctgaccaacatggagaaaccccgtctctactaaaaatataaaattagccgggcatagtggtgcatgcctgtaatcccagctactcaggaggctgaggcaggagaatcgcttgaatccaggaggcagaggttgcagtgagccaagattccgccactgcacttcaacctgggcaacaagagtgaaactgtctcagaaaaacaaaaaaatatgtatatattcatcgtgtacaacatgatgtttggaaatatttttatgttgtggaatggctaaattgagctaatatatgtattgcctcacatacttatttttttgaggtgagaaaacaaaacctattctcttagaaaagcactcccctaatgaaatttagcatctgttattatgactgcttactttattatgactgcccttttgtgaactgctattgagatcgagtgaaatgacaagggtactttctgagcaacctgcgcattatgaggccccactcaagcgtaaaaatgaaaactgagccactggtctgtttttgtttttgctttgctacctttccatggccgtaggtggacaatcagctcattggtaccacgcagcccttcatgctctatgtgactcccctgagcaatgagaatgaggtcatcgagaccggcccagctgtgcaagtcaacgcagtgaagttccccagtaagagtgcactgaccaacatctacaaggtgggctggtggaggaggctggtgggttgatgccatgctggaacgttgatttgttctctcacagccaagtctcagagcagcagtgccgggtgctgatgggaatagctctgcagggttaaaccacatgtgacataatagattgtttggaggaattgacaggaactcctccttctcagttgtgttttcagtgaccttgcaggtgacagtttgatggtactgagtccatataggccagagtccatattcatcagagtgaagtcactgtaggaaagtatagcatcttctagataggtcaggaccaggcatgatccagatctattattaaaaatagaataaccccagctgggctcactggctctcacctgtaatctcagcactttgggaggctaaggcgggtggatctcttgagcccaggagtttgagaccagcttgggaaacatggtgaaacctcatttctataaaaaatacaaaaattagctggacctggtggcaagcacctgtggtcccaactacttacttagcaggctgaggtgggaggtcctgagcctgggagtttgaggctacagcgagtcacgatcacaccactgcactccagcctgggtgatagagtgagatgtgcacctgcgcgcgcacacacacacacacacacacacacacacacacacacacaataaccctgaaatattgggaaagggctatgatgggtctgaccttgagacagacgtgctgctacctaagttaccacactgtttaccaaaagcagatagttacaaatgataaactttctttcttggaggagtctccacgcacaagctagctgttccagcagcaaactctggaaaagtgggagccaaccaggggttgcttcccatatttctggtcctttatcaccagtgctgatgggaccaagcctgcctgtagccctcggatccacaagcccagccatgctgctccttaaattagctgccatccatctgagcacacaccataaagttcatccaccacagtgcatctgaggctggaatcctgactaatgaggcccagattgcctgggaaccaaacaatagaatggcaaaccatctattaaacatcttttggagtttttagttaatcataacaatatagagagagataacccagaaataatttggcattatagttataaagccacatgattaatgaaagcataccatgtcattgaggccttcttaatagcacagatgaatgttccttctggtgttcacactttaaatcagaatttctttatctctagcatctgatgatcacagctcagagattcacagtgcaaattgaggagaaactgctcctcaagctgctaagtttctttggctacgatcaagcagaatcaggtaatgttgaatgttctatgtctgtgtttgggaattggtccaaagatggtatttttgagtctgtttgtaaaaataggtagccccttggtgtctgataggctccctttccacatctcagcctgagctaggaagctaaggcttgtgtttcagttgtgctttttcaaagtattacttgttgtctgagttatctctgtgaactaaaggagccattcagagggtcttctggaatcctggagtatccagtggtatacctttgggaagcagtatactattcctctttgctttgcatttttttgattcatctgctctaggatgacagaaatgatattagtcatttagcaaaccattttgtttcctaacctttgtttcttaaacagactccaggccaagaatcagaaatccctttggcagttcctttggtttagttgagaaaataaaattggctagcctcaattcattaacttttgacatccaaacccttgtgcctttttgtaattacaaaggtttctgcttatttactctcttctttgtagaagagagtaagataagctattgaaaagcccaggtttccagcagtgctacagaaataattgagctgttgcttcttttcgattcctcatcacagcctttccttccgctcttagatgggcttttcatggctgtgtatacagcttagaaaaaagtcagtaatactcagtcttttgaagcctaaactaaatattgagcctgaagaaatgataagaaagaggcttttatgtttatctgcccatgttggctagagaaaaaaatcactgggaatgtgtgtacacatgtacatacatacacacaatgcaagaaaaatatttttgttctttttatcccagatttagaatttaagctttaagagtatttgggatcaagagcaagatcctgtctgtttaatgctgtgttttccactttgggttggaacgccagtgtttatttgtattcagacagccacttgggagcctgcctgccaggtatccattctgttttggtaccttcctgggaagttttactttaaatttgattcgacatgcttttcttgtaaattttcttataagttgctgtaataaatttctcctcaagcatggatttagacttttgtaaaatccttgcctgcctttcactgaagtgggagctgactaaggggttgcttcccatgtttttggtatgttgtcaccagtgctgatgggatgggacagaggcagcatgcagccctcaggtccacaagcccagtcctgctgctccttaaagtacctgccatcctgtctgtagctgtttctgcttcctcagcgtaaatgggcaggtctctgttgcagtatcatttttctgtaagtagcactgatgatagcttacaacataaatgtgtttgataagtaggtatgtgccagctctctggttttatttccaaggcacgtgaagccaaggcaaaatatgctgcccagttggatgtgcatacagcatcaagtgcaaagagcacattgctgtgttgtagcccatgctactcctgctactccttttatttcatgagatggcaagtaaaaaatctgccttgattgtcctatttaaatggatgtccaccatttgggagacagggcgctgcttgtagtgatattacgtctttacagcccgcagcctgattctttttcaggcatttatgtttcactcagattcgtgaattggtgatatccattttgattcagttacactgcactccaagaccttatttggatatgatcctaggaaaataaatttagataatctgggtcattgataataacattgctaacaaatacacctgtggcctttggcttttccatctggatgattttttccaaagatgacatctgttggatggtatggagtcacaagttaacatgctagtcttcttttttgataaacaacacaaaacagatctactcttacaaagaatggcatcagaatactatacacgtcactgtaccctcacaaactaaatcgagagtgatagatggtttcctttttttgatgatttttttctatgtgaatacaaagtggattctgtggatcatgagactaagaaattcttttttgtttttttaattcttcctttgtaccagaggtggaaaaatatgatgaaaacctccatgaaaagacagctgagcaaggtggaacaccaattcgatactactttgaaaatctcaaaatcagcattcctcagatcaagctaagtgtgttcacctccaacaagctcccattggatcttaaggtgagctgctatttgggtaaatttttttagatgatttttccttggaaaagaatgagtgtgtttactatttgttgtttgttgttgtgtgtgtgtgtgcttttttttttgtccctcatcatcattcatagcagacattttatttttacagatttcctttttcagaaggtttattgacttacgtgtatttgtctttaaaaaaaaaaaaaaaacgaaacttaaatacgacattgccgaagatcaaggagtagctcaagagattcacagataattctgtaaaacccatttgctctctgtttagctcctggcttacctcagtgagataaaagcctttttcctaaagttgtgtccaggatcaagagaaaaagcagtcaagacagcatcttctttttgtgcccgaggcctgctcaccttcctacttctctcttcctaagtatccacctctttttgaatgattgtcactaggattgtctactaggagtgtttaaagtcgactcagcccacttacccactgggatatggccttctctaccaccacatcaggatgaagcccttagaccatcttgatgactacttactagacacagcctgaacaccgtcttcattttcagccataaagtttatcttcatcaaggaagaaagctgggattcaaatccaagcctgtctgactctaaagtctattttttttttcactatactatgcttccccatagaacataaggaaccagagaattttagacctgtgagtcctcagtgatgtacttgcttggtagacagggaaattgaagttcaaagtgttttgtcagtcaaggctgtgtggctaggaagtgataggagcaggagtggatccaggggtgttagaaagtctttccttagtttgagtcaaagtcagccccctgcagcttggacccattggttctggtttttcattctgttgcacttaaagataatactcaagacctccatcttcctactaaccaccagtcgaggactcttctcactgccccatgctgcctcctctaagatgctacaagatagtcatcttgctgcgcagaaacagctagagatatgagcagataagaagtaagtctagggtcctaacgtagatgcccgcaggagctgcgctggcgatgcagcgagtggagctgcacaccggggtggtgtcgtgtctgcccaaccaggagtgcctgctccatctgaaggggccgccacaacccgctccagccgcttgctgtcatggaggaatgtgaacctggtgttgccagatcttcagatttttaaagagaaaccggaaatctggatttttatgtggaatctcctggtttttaaacattggcaaccaattcaagttttttggtttttttaaaccttgtgggcctaacaaaacacatgtgtgggcctcatgtggccgtgtctgccaactcacagcttctaaaattgacacacaggtaatgagacagtagtctggtcaacatcagatcacatttgggtaagggtagggcaagggtgacagcattggggtggcaaactggggccaagccacagggagtgctggtggggacctggagcaggaatggctcttgcagccatctctggaagagtgcagcgtgcccttcactcactgccctgtctgcttcattcgctttaatttcatgtttcccaggagattaaagatacttatagttagcatgggagtgaggggaaaaccatgggaaaaccactatcttgttaatatccacaagtatccacttgacttgtgtgacctttggaatgggtttgtttgataaagtatatattcacccagagcacttggcacttgcccagcaaaccaatgtgaagcatttcctgagggttgaggacttcttgtttttaaaatcatcttactaagaaacacagacacctcactattcccttcaaattgctcccagcagaaaactccccagactgagaaaagcagtctgattttctgcagttgaagtagctccagccccccccagttacatgatggttgtgtgtgcgctcggcatacaatcaacgaaatcatttcagttgaatgtttcatctggcactgaattgaaggaacattttcagggcatttttcaaatcattgtgaaacaattacatggagcagccatgtgatgaggtgtgtagggggcacgccgagtgtagtaagttaatgtttccagcagggtgcggggaattgggactaaagagttaaattctcagcttgtgggagtcacattttactgtgtcttgagtctcctagtggagtctgggactcataaaataatgtcatttattcaaagagttttctaacagagtaatatgcctttattagtagctcttagaagggtactatgctcttttagatgaatatataatggctaaaagtgtgtgcttagaaaatggagtcctgtccctgaacaggagtcacgagagcctgactaaaaggtaaaccacgtctttggtattgaaggaataattatcttgattcttctgactccaggccagaagtgagactgtcagaaatctcagagggaagtctcttcaggtttacactgagggtacattgttgccagatatagtgtctgttcaaaaggactgaaagcagtttcacatctgctatctcaattggattccttactctgcggtggaagaatggggagataatagtcccatttcacaaatgcagagaccaaagcacagcattcctgcctgactccccattctctccattctctcaagtttgcgtgttagaaagtggccgagtgatactgaaaatgccaggtagtttatacgtgtttttggctttttttaaagatcaaaagaggccaggagcctttaaacggtttcatgaggtggcctacagcagtcctttttccatttagagcattggggtattacaaaagaagggctttaattgagcaatctagtttggaagaaaacccacattttaatggtcagagtgagagggtgggggttagggggagtttcgaacaaagacactatttaaaaagcctaaaactgtcttctcaaaggcttgaaataatttgttgggaaacttcagaccctttacttttttcctcccctccctaaataaaaaccagatttgttaaaaggaaaaaagatccagtattgttaattgtatttcagaaagtgccagagagggaaatatctctgtagttttaaacattgtcccaagagggaaataggcaaataccctgcttcacataaacagtctctatgtaccataaataaacctttaaagaatgaattccagacagttttgtttagtgcaggataaactaagaaaggaaaggacatggccgagggaatagcttgggatctgagaccttatggtatatagacaggtatttcttctttcaactctatgaagtttctggaagacttcagcagttttcgcgtggggaggtagaaatagacagtttcctatttttattaggagcttatgaacacaagattgccttctccaaaatccattttataacaggaaactgtctgctgcttgagtaaataagcatcaactttgtatactactgtatttgattagtcatttagttactacaagaataagccctgtttggctcgttccctcatctcgactttgactgtccagattaacctgaaggtggcagaataattcataccactgggctgtatctcagctttttcaaatgtggagtcccaaaagcagtaaatgactaggtaaggataacttttacttaagggccagaatatttcctcgattcagaccaagcaccttagtcattcggaaaggtaatagtgtctatgatgaaggttttgacatttcagtagaggtttcaaagtctttgctactttgtgtggttcttctttaatatttggttgcaaggacaaagttggggtataaaagctttttaccttaagcctttgttttgatctcattttctcttctctgagaataaagtaacgctcaaagtagtattggcaaaacagagtgctgaactgattgtcagtaccctgttttcccagcgtgtttattttatgactctaagcaaagcagttgagcttactgaacgttcactcagtttctccgacagtgaaatgaggaaaataaggcctgctcacgtactttatcatcactcaccatgaggtggggtgaggcatgggtgaatgaatagcagaacatttttcaggagaaataataccctccattctggctttcatgctttctacctaataggtagttgctattgtgaaaatgcacatattcaagtctaaaatcaagtagctagccatatgactttaggccatccacttaacatttcttgttttatttataccaaagagagagagagagagagggagagttaggctgaattaacttgatgttggacttttttgcggggtggggaagacagggtctcactctgtcaggctgaagtgcagtggcatgatcacagcttactgcagcctcaacctcctgggctcagatgatcctctcacctcagcatcccaggtagctgggattataggtgcgtgccaccatgcctggctaatttttgtatttttttgtagagacagagttttaccatgttgcccaggctggtctcaaactcctgggctcaagttatctgcccacctcagcctcccaaagtgctgggattacaggcatgagccgctgggcccagctcaacttgaggttgctattaatctctaaaatattctgaaattacttagcaggaggttatcagtgacttcccaaggcaccaagtccagtgacctttctctctagccttatctttgtagcatcctctgccattttgacattgctgacttccctgttcttgacatctgtcctttctggttctcctcttgctctgttgcttctctgcctatttctgttttcgtttattctacttcttcttttcctgatctgtatgttaaaggtccagatttttctctgtgaactgtctggttatgtcacttgtctatttttctgtcaggccttttatctcttctaattttagaagctctttctaaaagttatgtctttgatgaaagttgcaagtattttttcttcagctttttgtctttttactttgcttttggcgtgtgtgtgtgtgtgtttgtgtttaattatacaagagctgtttatttttatgttgtcaaatttattagtcttttgctgttttgaatctaatttttttttgaaaactacatgttcagagaaattctctagtaacaaactgtagaaatgatccctgaaagcatagtcttgaatctgaattttgagtcacaaaaaagttttcccttctctatggttttaaaaaatttcaccctttcttccattatatgattgaatttcaattaaatgtattcttgttccaaaataatttaaggcagtctcagaagacacatgcaaaaagattataagtaagaaaacagaatagaaatgtcattaagttgcacatgaaattttaatatataataaagagactttaattcagtggggagtatatagacttttcaatagtgctattagactaaatcacaatagaaaaaatataaaattagatttattcttgacactttatgtaaggataaattccaagtgaatcagagatttactggtaatattagcatgaaaaagtgtttttatattcggtaaggaagagtatttggcatgccttgtaaacaccttgaaatatcaatcattttaaataaagatataatcagaaaatagacccatatccagagattgttaaccagcttatagcagacccaggctagttgagaacttcaagaaaagacagatcgtgggggcggggttggggagtgtccatgtgaagccattggaaagctaccaaaacagccaggactggagagttcaagatttatgagaggagagaaactcagtaaggtgagcccaacatttattttgcttttattcttgagactttttctgatttgtaagcagtgtggggagaaaggtgaagaagccaagcagaaagcagctgccaacaggcagagaatgcaagtaaagcttttggcagtctcatggggctagcaaagcaaaacttagacttcattgctactaagagagctggtaattgaagggctaatatcttacagagaagggacaggcagaaaacaaaccccaataatctgaggtactttctttcttgagatatttgatgatttctaagtgacacagtctgagagaaatcaagcaaaaagtggcagctaagaggctgaagaacttaaacagtcttctaagcagttttgtggtactagggagattaaaagtggaggaatggcattggttttcgttgagactgctaaaggactacaccaggcctcataaggactaaaacacaccagaacttagataaagactgaaacacagccttgagaaaacccaaaccctggttgatttaggcattatgcttcttactctaactgcctaccagaagctaaaaactcatccaaagtctctgtaagttttcatacaaaatgttgcattcagtcacaaattaccaggccaagatgagatgagaccaagagaaaaaacaaacactagaaacagaaccatagataaactggatgttggtatttttagacagagaatttaaaatactatgaaggtatctaagaagtttaccagaaaactataatttttttaaaaaaattatcaaataataagggaaaattatagaccagcactttttcatgaatatagaagaaagaaatctgaacaaaatattagtaaatcaaaaacagaaatatgtaagaaggctaatataaccaaattggattttttcctggaatgcacattcagtttcacatttgcagataaatttggtaatttaccacatcaacacgataaaatagaatatgattatttaaaaatgcataaaagctgtttgacaaactttaacatccatctacagtaaaaattcagcaagctaaaaatagaagataactgctttcatctgtttaggtctatctggtaaaaagctacaacaaacatcatactaattggtgagatagtaaaagctttttcttgagataaaggaaagatacccattatcaccacttctttcaccgttacacgggagttcagccagtaaaataagtcaaggatgatctttttgaaaaagaagtaaaaggcataggagctggaaaggaaaataaaaacttcgttatttgtagaaaacacgatcgtttactagaaaatctaaaagtattttcagattagttattagaataagtaaatttagtaaggtcactagagacagtatagaaaacagttatatttctacatgtcagcaataataacagagaaaagaaaaatttggaggctattaagaaaacaggtctgggtgtggtggcttacacctgtaatcccagcactttgggaggcctaggtgggaggatcacttgagcccaggagttcagggccagcctgggcatcatagggagaccctgtctctacaaaaatggaaggaaggaaggaaggagggagggatagagagaagggggaggaggagagagagatgagagggaagaggagggagggagggagggagagaaagaaaacattaactactgtatcattatctattattgtgtaacaaatgacgccaaattgcagtggtttaaaacaaccaccatcttatttgtttacaattctgtgggttaataatttggactagacctagctgggtgtttcttctgctggtctcaccagtggttgttcatatggctgcactcacctggcagttaaacgcgattaaatggtatgagatgacctcagtctcatgtccagcggattggtgctggctgtcagcagaacccctttccacatggtctcccatcttcaaggaagctactcccagcttcttcacgtggtggaagcatcaaaacaggcagtgcagaagctccaagctctcttgaggctcaggctcaaaggtcacacattattatatctctcgcatcctattggctgaagcaaatcacaaggctagtgaagattcaggtggagggaacatagacttcaccacttgacagaagatgcaaagaatatgtggtcattttaaatctaccacagtatctaagaataaacccaaccaaagacgtataagacctctacacagaaaacaattaaacattattgtgaaaaattaaagacccacatagatgaagggacataccatgtcgataagttggaagattcggtaaagttgtcgttgctcctcaaattgatctgtagattcagtacagtcctgatgaaaattccagcagtttttttggaagcaaattgacaagctgattctaaaatttctctgcagttgaaaagcgcaaagagcagctaaggtaaccctggagaaaaagtacaaagttggggagagcttacactattcgatttcagaaattattacaagactacagtaattaagacagtgtggcattagtagaaagcagagcaaagtgaaacagaagagagaatccagaaatggatgtataataccatcacgtgacttttgacagcatttatgccatactgcggtagtggaacggatgaccttttcagtaaatattacttagttcaatatttatcagaaaaaaatgaatcttggccactccctcctaccgtacataaaaataaattctaggtggagcataaataaaatctaggtgtgaagagtaaaacaataaaacttgtataagtaaacgtggtaatatctttatgaccttggtgtagacaaaaatttcttaaccaggacacagaaagctcttaccatataagaaaatattgataaggcagatttccttaaaattaagactgtctgatcattaaaagacaccatttaaagagtagtaagataagtcacagaatggaagaagatatttgcaacacatctgttcaacagaggacttggtatacagaatatataagaactcctacaaagcagtaagaaataaaaaacatgaactcactacaaaaatgagcaaaatacttcaataagcacttcacaaaaagatatccaaatggcttatgcatttaaaagttgcttaatctcacttctcaactgaaaagagactacgctgaggtaccattacacacccatcagtttatctgtcaaaactatgctgagataccattacacactgttcagattttctgggtgtttttttgtttgtttgtttgtttttgtttttggtcgttgtttgttttaagtgacagggtcagccacggtaatcccagcactttgggaggctgagatgggtggatcacttgaggccaggagttgagcaacaaagtgagaccctgtctctccaaaataaaaaaaaaaaaaatcagctgggcgtggtggtatgtacctgtagggggaggctgaggcaggaggatcacttgagcccaggaggtccaggctgcagtgagccaagatcccgccactgtactccagcctgggcaacagagactttgttttctgtttttgagaaagaaagagtgaggcagggtcttactctgtcacccaggctaagtacagtggcatgatctcagcttagtgtggccttgaccttcaaagtccaagtgatcctcctcctccagcctcctgaatggctgagactacaggcgcacgccaccatgcccagttaatttttaaactttttgtagagacaaggtcttacttcttcacccaggctggtcttgaacttctggcctcaagcgatcctcccacctcagcttcccaaagtgctgggattacaggcatgagccaccactcctagccagaatatctttttttttttttttaaacgatctataccaagtgttgatgagggtgtagaatagcaagggatcttgtagactgctgaatggagcataaactggtttgaccactttggaaaactgtttggcagaatatattaagattgtgcatgtacattctttatgacccagttccactcccaggtatatgtccaagaaaaatgcataaatgtgccccaaaagacatagctaggcagggagcagtggttcacagctgtaatcgcagcactttgggatgccaaggcaggcggattgcttgagcccaggtgtttgagaccagcctgggcaacatggtgaaaacccttctctacaaaaaatacaaaaattagctgggcatggtagtttgcacatgtagcctcacctgctaaggaggctgaggtgggaggatcgcgtgagcccaggaggtcaaggccgcagtgagctgtgattgtgccactgcattccagccaggacaacagagtgagaacctgttatctagtctgccatagacatgtctaatgttgtttatagcagcattattcataatatcaaaaagcctgaaacaacccaacttttgaacttttcatcaacaatggtggttaaatacattgttttattcttgcaatggagtatttatatggcaatggacgttaacaaactacagctatatgcaacaatctaggaaacccccatatgtaatgttgtctatgagaagccacctacaacgaagtgcatactgatgattccatttatatgcagtttaaagcagaagaacttacctgtagtgatagatgtcatcactgtggttgtctttggggaggaaggaggagggagtgggagcatgctcatggtgagtgggctgcttccaagatggggataacagtctgctttctgatctggtggtggttacattattgtgttcactttgggaaaaatcatttgggttttgaactatacatttgattagtatacttttctgtgtgtgtggtttacatcagtcaaaaagtaaaacatgacaaacagatacaaaacagactaaaaggaattatgacacaaactgatagtgtttatttctgtgtgatacatgtgacttgggtgatatatgtctgtctatatatgtatttttccctagtattttacttttatagttatagggaaaatccttatttataaacatcaaaacctgaccctcattcgaaagttaacatgacttgtagctttaatggaatctagaattatagtatcacagaaggccatcatatgacttaagtatgtcatttcctttcttccctaattaggccctaaaaagcaccttggggtttcctttgatacggtttgaagacgctgtgattaatctagatccattcactcgggtacatccctatgagaccaaggagttcatcatcaatgatatcctcaaacatttccaggaggtgaggcttggagaagtaatcattggctggagcataagcagaatgtttgttttagttgtttgggaattttggttactaaggcattactattgagaacccagttaaacatttcaactctgttgtgttacgggtcaggtcacttcccaagaagcccgtatgtgtcatgaaaatcctgagatagtacatttgacctatgagctgttagtttcatccctcagagctagtctgaggggttcctgctagattaatcatgactcttaatggtttagttgatgctttaataataacaaaataatgtttttatttaccaggcatgggccttctttcagcaactacacccatgttcttagagtctgtgggatcctgcatttgggttgaacttgaaattttttaaatcaccttggacattttccattttgtatttattatccagactgcaaagatcaaaaagtaaaggcaaggcataatcttcaatgaatagataggtcaagatcgtatcaaatttaatagctttcaaagttaaaatatattttattctcacttccttttctccattccccgtttccttttttgactatcctaattggtgatatttccacctaactaaggaaagtgatacagcagatatcactggaacctgggatcaggcaattggaagtacagaaagagtggaggggccagtcatggtggctcacacctgtaatccgagtacttggtgggaggccaaggcaggaggatcacttgagctcaggagttcaagaccagcctaggcaacatattgagaccccatctctacaaaatatagaaaaaaaagattagctggttgtagaggtcttgcctgtagtcccagctacgggaggctgaggtaggaggactgcttgagcccaggaggtcaaggctgcagtgagccacggtgatgccacctcacctcagcctgtgtgactgagaccctgcttcagagaaagaaacagtggaggtttgcttgataagtctctccatgccttcttcaggccccccacccacaccacagcttatgagaggaactgtaaatctacctctcttcctcactttccttttgtaattctccctgctggtgattacttctctatttgtaggcatgatgaaaaggagagtatgatgtatatagtagcaaatactcataagaatgcttcctgtttcatagctatttttattcttctaactggcttggaagagtatgtgtattgggatatgtgtattgggagaagcttaggtggtgctcctgaaaggacaggagattattttgcagttgatgaagattaaaagcttttaatctcgttacttgtagtaatgagaatggagaacaaaatagatttctaagctcttcgcttgggacactggtatctgcaaatataagtagatgctgattggacttttctcttcctgttccatttggcaggaactcctcagccaggcagctcgaatcctgggatcagtggattttcttggcaatcctatggggcttttgaatgatgtttctgaaggggttactggactgataaaatatggaaatgtcgggggcctcatcagaaatgttacacacggagtatcaaactctgctgccaaggtaaggaaatagaggtgaaattccattataattaacctcacgagtcctctacagtactacaatttcttttatagttaatgggctgtgaaaagttatattcatggcttttgcttcattgcccacatgccttgccttttcctcacctccagtcacctgccaccaggtgcactgagtccacctctgaaatacctcttcctccttcctctccgttgccactgccttagtccaggcattgcgtatgtcttacctgggtcactgcaatagcccccagcaccctggacctttcacgatgacccctacacctttcactgtgccaccagaatgaactcactggattgtgccattctcctgcctgagatctaccagttattgcccacagtttacagggaaagtccaagctgaagtacagccttctataatgacaacaaccttttaagccacctgaaaccagcagcagatggacagtgatgtcattctccagtatcttgcagctagttgactggtttgttcactgacatcttaattcgtggacattttcttagttcactctgtattttctggcaggaattgattatatgcgaagctggaaaaggtgaagcgagttgaaggtagttgctatttgacatacagccctccaaagagctctgctttttttctcttcctttcatctcaacacacttttcttgtagagactggctttttcatgaatgaactcatttggaggaaacacctgtactctctgcttatttactgtggagagagcatttttgtagtgagatcacaggtgtacttgcgccacagggtgatatgacataaaagtagctttaccaaagagatctttgtggcaccgcgtagaaatgtatcttgaagaggaggtaagagagtcgagttgaatagcatttctctgtggtatggtgttctcgttaataatgtgtgaaagctgagaatttattcttttttccccaaactattttctagggatgatagattggtcagatcagttctgtaggattattgaaccagactaaagtgtactgtttggcttgtggttcaaaataagcaacagtcttttctttttcttttttcttttctttttcgcgacagagtcttggtctgtcgcccagactggagtgcaatggtgtgatctctgctcactacaacctctgcctcccgagttcaagcaactctcctgcctcagcctcccaagtagctgggattacaggtgcccggcaccacaccccattgattttttgtattttttagtagagacggagttttgccatttggccaggctggtctcgaactcctgacctcaagtgatccaccaacctcggccttccaaagtgctgggattacaggtgtgagccactgtacccagacagcaacagtcttttagagagactttcccactcatggtttgaaagtggtgagactcaggttcaaagtctgaactagcgtgtacttttctgccttgaatcctttctcacactcccatgttcccttacccctcacgcatcataaaacctcatagtggtaacacagatccctcactcttcttgctttagctcttggacttgatataaatgaatgaacttaaatatttagttgtaaatgcccagttaacatattttattaaattttattaactttattgaattctaattgacataagaaagtcttcttggttttataatttctttgtttttgtaccctgggctttaccataattttaaaaatgaagatgcttatgatttaacaataggacttcctcactgtggaatagaaatgcacctactttacaggtttattgtgagaacaaaataaggtatgacgttacaaaaattttgaaaaatacagagtgaagaagataaataggtcattactttgactgtagtatttgcatggagacttgagccaccaggaagccattagtgctcttgaaatgaaaaccaatctattatgaactacagagaaggagggtctgggacactgagagtaggagagtcaaaccccatcagggccagtttgactcttaggaacctccatagttcactgggttaagaatgaagaagctgttcaagtgcctgtgacatctcaacaggagagacctcctaggagtttctccagggtctcctggcaacatcctagtgaaaggattggccctttattctccttggtttgtggaagtctcgtttgtttcctggtttttctgttttccctgaaaaactgtttttgaagcttgagggtcagcatgagattataacttaggcagaaagaaagggcagtgtcctccctacccccaccctcatcctggatctatatgaaggcctgggggcagtgataatacatttgatttggtatcatgctttgtatgttgccagatttatataagggtattgctttccagggaacgagtcctctggtatgggaacttcccttcccatggggttgggttccttcatatagttgtcttgcctttaataagctactagtattggagccacaggctgcagctgaggggattgctatgtaatttacaggcatagattgtgtattagtccattcttgctttgctctaaagaaatacctgagactgggtaatttataagaaaagaggtttaattgactcatggttgtgcaggctgtacaggaggcatgatgccagcatctgcttctggcgaagtcttaggaagcttccaatcatggtggaaggtgaagcaggtgtctcacatggcaggagtgggagcaagggaaagaagggggaggtgctacatacttttaaacagccagatctcatgagaacttgctcaatatcatgaacaccaaggggatggtactaatccattcataagaaatccacccttgtaatccacatacctcccaccaggtcccagctccaacattggggattataattcaacatgagatttgagggacaaacaccatactatatcacattgcttaacatcagggatacattttgagaatcattttactaggtgatttcattgctgtgcgaacatcatagagtatacttacacaaacctagatggaatacagcctattccacacctcggctatcggctcctaggccgcaaaactgtacagcatgttaaagatatctaaacctagaaaaggtagagtaaaagtatggtattataatcttatgggtggattgtcgtatatgcagcccgtagttgaccaaattgttatttggcacatgactgtattttgataccagcaatcttaggtgtttatagagatgtaaaaactagttatatctctaagatgagaaagcaaataaacacaaaatgaccacttcttataggaaatggtagatctaaatgggtctatcagttgaatacccattcaggtcatctgtgattctgcacgtatgtggttggactaaagatgtgcattttcttgtagttttgtgggttgaaatcaacgtttaaagttgttttaggggaatgttttatttgtttctctgtgtagaccagaggagtttgaggaagtacaaatgaccacaagaatcaactgttggcctgtgtcaattattgctttaaagagtgcctgagttccagtgattaaaaaagggtcagaggggacagaactgcacctcattgagcccctgccagtgcactgcactttactgcaaagaccagagggctttagcctggttgaatgggctttgagtgtagtggagaagttcataaacctcttaaattaattgtaaatattgtataaatgtgcatttttctgggatgagggtccaatgtttcttttgtatcctcagggagagattcttgcctccaaagattgtaagccattattatagacatacgtttgtacattgaggggagcttggggctggtagtcaggattgccagcactttaattgtatttctacctttaaataatcttttcctctgttaagagatttgtttttaacatttatgaaaagatgatggtaactccccctgtcacactggcctgaggagcaaaagagatgaagtatatgaaacccagtgaggagttaaaaggaattcattctgtcacataagaagataatagacctgtagggtttagtcatctgtggatagatgcacaaattttaaatttcaggtctatagtgtatccacttgtggaatttctcatttcttttttctccccccagagcgttcctgcaaaagaaacgtctcatttcatctctgttgtttaatttatttaatactggcttcaaggaaatataagtaggaaataacctatgcccttttatctcagttatttctctttgcctttctttctcatctcccaacgctagaaatcagcatatggattcaaatgtaagatttaagtcttagccaccaaattgtgagcatctaacccatgactcccctgcctgggtcttggcaagatgactctagcccttagcggaacttcaaagatctgatcccattcctgaggtcatggcaaggcaatcgcttctggaaggtcttctctgaatgtgatttatttaagaaaatgacagcatttcatattccaaacccatgtcagaggagaaagtttctttctgcagcatgagttgcaaaaagtatactttcttctagttgtgtgtcatgtgaagaatatctgcaagacactctaacatcttttaaaggcagagaactgggagggccccctattgatgaaatttcctctcttatagactctagcttcatttttaccttcattcttgtgtgatattttcacatacatagctatcctcaacaaaataaataaagtacttcttaaattaacaaaatctcagatattaacaatagagcaaatgatcccactgtcttttctgcccctgtagaaactgtgtttgctctgcaccgttgttatctggtcttcctaagggaagaaagccaacagcatacttaatttcttccagcaaaggagagaagcactttcagtcatcactaatgaaacctctgctcattctgtcctactttccatccccctttttttgagacagtctcactctatcgcccaggctggagtgcagtggtgcaatctcggctcactgaactctctgccctcctgggttcaagcgatcctcccacctcagcctccagagtagcagagattacaaggattacaagcatgtgccaccatgctcgactaatttgtatttttagtagagatgaggtttcaccatgttggccaggctggtcttgaactcctgacctcaagtgatctgccctccttggcctcccaaagtgctgagattacacacttgagccactgcgcccagcctcatccccttcagtatgtctttatcaagtcaatataggatgcttttgattctgggtacctttttgatcccatgtttgttttgattctgtgtttatgaatacagatattttcataatttgtcgtgttcttaacaaattattttcatagtggttatttgctattcatgtaaattagaattcattgttcattgtttgctacatgttaattttactaataacttttatagttgtatggtagttttctcttttgctttgtggtatttatttctaccaggcccaaatttcccagctcaaattctgcagatcaaatttttgtcaaggagatgtgagttttctgccactttttagttaatgcattttattctatgttgttttagccattgtttcattgtcttaaatcagttttgttttttatgaatttgacagagatctaattttttagatgatttcttggtacaaacagcattagtaggaaaaggtgtaggaacagggttgaaacactgcacttcattgtggaatacatactaatgtataaacatttgttgagcacctcctgttggttaggcttggtgagagaccctttatatacattgtcttctgtatgttaagctctattctgccaatcaggaaactgagagttagagaagttaagtcttcaaggtcacacagctagaggtgacaggggtggatctgaatccaagtccagctaattttgaaggtctttttttttttttttttcttacaggatgtttttcctttgtgtttgtaaggcattcttctaggcactgcagagaatatgaaacattaattactgctgacttcccaccagaagcctcttatttgatgtcactgtgtagctggtcagtgaccactatggtagcattcttggcacaaagcaggccctcaggaagtgctggtgcccaccgtcattctcgtgttaggttggttgtggctgtcactgtcttctttataggcaataagaaccttggcaattgcaaccatggttttactcatgtgatatcatttgatcatcagaattacctggtcagtagctagatgggcattttcagccccattatgtaaatgaagaaactgaggcccagattggtcaggtgactttcccaagatcagccaggtcactacagagctgagacctggctcttctgtactggcatctcagttctcatttttaattagacttttgagatatcacttaactacaagatttattctagacatgcctctatgtgttaaacaaataaaccaaaaaaataaaataaaaagcaaaccaaacaaaaagccctacctagtcccacagtgaactttgataacttttaggaaaactgtctgaagataaatataagcaagttgagaccgagaaaacgagaaattcagacagttcagatagttcagtagaaaatctagctaggactttaaataccattttgttccatttctttggtttctgtttgggacagcagtgtggaggagctgcttcttttcgaagcaaacctttcaccagccctttgtcccaggacaccagatttggtgcctagccatgatccagtggaaactgactttcctgtccctgcacagagactctcagccagcccctgccatcagccagccttctatcatatatactatgaccttgttgaggagagaggggcccatctgccttttgtttaagaaacagcattttttgttgttgtttactttgcagtcactgtatttataaggctcagacaaaactaagagcaatgtttattcaaggtgaaaattttatctttgcacaaaagaatgcactgagtgagtccctgcatggattctgaaggcgaaaaggcaatttatgacttgtatctgtttttgtcattatgtatgactgctccattttatagttgagctgattatccccataatagcttttccatgtacctataagcaagtaataggtgaatgccttctcataagcattggggttttagtgtatttaagttggcacaaaacttcagggtaaatgaaattcacttcagacagtgatctttcccttagagaatgtaaggctttctattttcaaaaagactttgatcctaaataagtcacccgagggatttcttttccagtcaagaggaggtaccttcgagttgttgtacatagggaaatgactcaaatttttggcatcagaatttttgttttattttcctctgataattttgagtactaaaatcattcccttagtctgagctctttttggttagaagcaaattttagatgctgaatgactcaccctaacttgggcaactgtcaaccatcttgggggatctaataaaagtgtatttgtgggggccggggtagagtggtgtcatgagaactgcaagtgaccaaaattcacaggcagtccccatgtacctcactgagcagcctcacgcatgaaggagccaggtgagcagagtttgctcatgaaggagccaggtgagcagggtttagctttcccccttttccaccctaatcaggtagctcagtagccagaagtgacagagcagggaatgagtgatgccactattgatgtcctgtttttgaaacagaaagaaaaagttcagaacttcttcatttcctaatggtagttcagttaagaacaagcttcttcagatttctttttttttaaggcctgaacatgtcatatttgagaggaattaacttgatcttccaaaactggagcctgtgtggtagaaaagtatattcagttgctaagttgaaaagacagaaaatatttgtgtcccccaaaagtagtggttttctaccctagtgtaaacatggtttataaaggaatcatgtgttcaagctttcttaggttggctggtgacccttggcattgtggtcatgcatcccttttctgtgattcagtattcttcacatcagtctttggcctttcttgaaaaattgtgacaaactttaagtgagataaaattttcaagacactcactctgtttggaaggttctttctaattttttttttaaatttctttctaccttataattgttctttctaaaagtctgtctccatcttgaagaaaagctgaatcaaagtttattcttaggagaaagagggaatgtcttggtcaatatgacggttaaaaatcagaaagcaggccgggcatggtgactgacacctgtaatcccagcactttgggaagccgaggcaggtgggtcacctgaggtcaggaattcgagaccagcatgacccaacatggtgaaaccccacctgtactataaatacaaaaattagctaagcgtggtggtgcatgcctgtaatcccagctattcaggaggctgaaacaggagaatcgcttgaacccaggaggcggaggttgcagtgagctgagattgtgccactgcactccagcctgggtgacagaacaatgttgtttctgtcttaaaaaaaaaaaaaaatatcagcgatgtgaagagtgtagccatcatttattaactcctacatgtcgaatatgggcctaggatctttccctatgctctctcatgtaactttcacatatacccaataggaaggaaggaaggaagggaggaagagagggagggagggagggaaggaggattaagcccattttacagatgagaaaaattagactcagactcttcaggaaccttgattgaaatttaataatgactcattggagctagaagttttcaaaaaaaattaatttgggaggcagcctctatttttcctccacacaatgcaacttctcaggtataatcttttaccaaactcaaaaggttgtagaagcaaaaccatgagccgttggaaacaacattacttaaaagtaaagctcaagcagtcttccattcattcccaactttaacacctctgtgttgggccttggaattttccaactgtaatttctaagttttccgaattaatctttactatctggaaatctctaatctagtgtaaaagggttgaaatgagagaagaggattgggagatttttcttcattcaaatagaaaatgtatgactcaaaagcatttgagtaagctgacgaagctgatgttcctgttccaagatttattcaaatttaaatcatgtgggatgtgcagtccccaggcctttcctcccgcctggcccgggaagcagagcagagctttggaccactttggtatgagctgacagtgagcttcagatcactttcctgatgactgtctgcctctaaatgctatgtgttaagttgtaatttctttaagccatttcctgaacttcactcctttaagcatttctaaacaactaggatatcattttaaaataatagtgtttaattttcagggcagagtacccagaattagggagagttgtgcattcccactaacagttacaggcagaaaataaactcattgtccccagtagtccttttctttccttacccttttccccttagtttgtcctatagcttttcaaattttgtagattttttgtctctcagttctgctaacagattggctttcagatgcttagtgacaccattgcttgaattaagaagccagagggagaatgttggggagagtgtgttattcctgagagttttaaatttagttctgcagccgggcacagtggttcacacctgcaatcccagcaccttgggaggctgaggcgggtggatcgcctgaggtcaggagtttgagaccagccttaacatggtgaaacgtcgtctctactaaaaataaaaaaattagctgggtgtggtggcaggcgcctgtaatcccagctactcgggaggctgaggcaggagaattgcttgaacctgggaggtggaggttgcagtgagccaagatcatgccattgcactccagcctaggcgacaagagtgagtcttcgtctcaagaaataaataaataaataaataaatttagttctgttgaactgaactatggtttgcttcttggaggaatggaacaatatgatttagagtttcatcattccttattggaagaataataataccactttatatttgtctcgatttttagttgttggtaaagcatttagatatctttgatcctttctataagcctaaaactaggtaaatggtattattattgtcattattttattattattattattattattattattattattattattactcctgttaccattttatggatgaagaaacggagacccagtggaagtaaataattttgctcaagatggccaaacaaaaagtggtagagcttttgcacttcttcctagctcccctgactcctggaacattgctggacagcacagtcagccctccatatctgtgggttctgtattcattaatttaaccaaccacagatcaaaaccgaaaaaaaaaaggatagttgtgtctgtactgaacatgtacatgttttcttccttgtcattattccctaaagcatacaggataacagctatttacatagcatttacatggtaaagtaatgtgttataagtaatctagtgatgatttatatacaggaagatgtgtgtaggttgtatacaaataccacactattttatatcagggacttcagcgtctgtggatggatggtgtcttctgcatgtccaggaaccagttcccaatggatactgagggacagctgtacttcttaacctgatactgcaggttaagattcacaacatcgtctccatattatagttgggttttccaatgccagtgttgtctgtgagccttgttagcctctccttccctgcagaatgagtttcagagaacagaggtggagaaaaatgtatctttccctcttagaggcttgttgcactgttcattaaccatgctgctatttttatgaggcatttcagagtcatatatctgagagttcacaaagaaacaatgtatgacaagaataattcttgtagcagtttttgtgaggcggaggatggtagggagaaaatttaagcttatgtcaggacattacattaagtaatttctacagtgttggggatgagggagaatcccccctaagaggaaaaggaaggtacttctagaagcgggtgagagtctggcttttccttggctttcctcatagccacatgatggcatgtcctgcctgacttggaagggaggcctcagcgtgtcctgaagtagtgatgtggaggcgcagttggtccctggatacaggcacaggcatatcacactcacctccagcaggcaagggggaattacagcttcgcttttccttttctattacacaccagtggggaagccctccagtgccattcctaagaacaaggacattttctagttaggcacataaggatgatcaagataagctcaaaaactaggagccacattggagaagtcaggtttaaagtgtgcagagaacatgacagagagtggactgtgcgccatttgtccagtcatgcttgtgctgtcctccccttgcgcttgtactcagtcttgcctctgattggggtgcccttctctgtttctggccagaggctccaagtctgtaaggcccagtccacttgccatgttaagaatgtgatctctccccactgtgagttcccatggccccgtgtgcttccattacagcaggcaccagattttaccttgaattgtaaccatttgtgcacacatctctgatatccgtcaacatttctcacatcaccaattaggtgctgggcgctgtgaaagaatgttagaaaggaagacttagaaaatgttttcttctttttgtgaggatgtggaacaggtaaggcagagaaggagtaagtaatgataatccagaggaaataagtattgcagtggggtctgtgcaaactgcacagttccatgagagaagtgctgtggggccaggggtaagaacacttgattgtgttcctcaaggatgagattggctggagacaaaagatggaatgcaacggtctgtatttatttgcatcccagagtagaccctgtggaggggggccaggattttatctgacaactttttttttttttttgccagtctcccctctagccataaatagttattgtaaggaaaattaaagtgatccaggttgtatccatgtgggctgtcttttatctggcatagcatttttcacatgctgtacattcaatgaatgtgttattgtctagctattttctttttttatggaaacaaacaaacctttttttttttctctttttgagatggagtttcactcttgtcacccaggctggagtgcagtggtgtgatttcagcccactgcaacctctgccgcctaggttcaagtgattctcctgcctcagcctcccaagtagctgggattacaggcacccaccaccatgccaggctaatttttacagttttagtagagatggggtttcgccatgttggccagcttgtctcaaactcttgacctcagctgatccacccacctcggcctcccaaagtgctggcattacaggcgtgagccactgcacttagcccatacaaactttttaaaagtttatttacaagtttccccccaaacatatctgtaagctggtgaatagccaaaatcgtactatagcaatacagacaggaaaaggacattgacttttaggatcctatttcttctcctcccttccccatgcctcaggtctagcacagcactggggcacagcaagcgcttagcagatactgacctggctctcatgaagccaggtgggcactattgattggacccaggcttcgcttaaggtagcaggaagctggtttagaggaaggagaagaaaacctagtcccttttaatctaatgaattaaaataatatttatgggaaatatttgctttattccaggaaaatgtttgaagtaaacatttcctgcaagctgttgaatttatataataaaacattggtttggaaaccttaattgttttcactgaagtgaaaattaagcagaacatgcttcccaaacagccccttgtctcagttttgttgccattgtaatgttcaaagcaggatattgtggccattgaggtaattttctctttattggtaacttggaaatgagcaaggatcatgccaaagttagttataaaagaggaggcactcatggctccttgtagttttatagcaattcaacctttgtagcgtcctcctgttactatttgatcttcacaaacttatgcattaaagagtcaagtttatccccatttgacggataaagaaattgagtcacagtgaaggtaattaacttctggagggtcaaacagggagtttgtggaagaggaccaggctctttacagccccaagctcttttcaaagaccatactgctgctctagaaagcactctttcctccttcaggaattaaagcactttcacgtctgtgagataatttaaccttgcaacatcccagtggggccagcaggttaggtatgattatcatttcccttccagtgatgggaaattaagttacacaggttaaatggttttgccaagaccgtgcagtcagtgttggaaccaggggatggtgcccaggcttcacaaacactgagcccactcttttcctaccacactaagccttctcagaggagagccagaggagcttctgatgccttgaagacagctgtgaaacatcttgcttccaagagggccttgctttcctagcacccacgccagattgtgtgaatgcttggttctatagtctcagcgggtcatgcaaatctccagtcctacgatcactaagaaacaaagcaaaagggggcaaagccagatagattttaccagcctgtttggattttgtgtccagtagaattagcaagtgaaagttgtaggattgctacagaagagttgcttagaaatcaattaacgtgacaaactgaggtgcctcaacaaataaattatatggagagataaaagttgttaggactaaacacaggaagaatttgccacttgtttctctgtaaaaggtaaaaacataacagtgaactgtgtctaacttatgttaaaaaattgaatttggtgagaagcctagttttaataatatttcatatgataatttaaactctctaacttttgcctatttaaccccatcttgtattcttcctaagagatgtgtcaacactaaaacttttcttagttattccagctgaatatggcaaagctacaatagcttttcccagatgcagactcttaacacaatcgctgatattcagtagaaactctttggatagcagatttgggaaagaaccttaaggccagcctttagccctctcaaattataggtagagaaactgagaccctgtaaggttctcaaagctaattagtcacagggctagccctcaaacccaggctttctggctacagatctagtatgattgttgagactgggccggcagcttgtgggcacctgcttggtaggagtgagggggagaaaagtagtagggtgtaagccttgcctactgtatatcttctcagcgttctttattttttatccatttgtgtgtctgtctcccatactatactgagttccatgagtacaagggactaagtcatactcgtcttggtatctttaaccctaagcacttagcctgtgatctaggaagccctcaagggtttgttgcactgaaccagtctgttctgtgtcaaggtcaacttaccggaaggggctgcaggtagtacagctccttaaagcaccttctattactagtccttcagcagaatcttacccagtgagtaaacccatgcaaaacttttgcatctctcctgaaagcagaacaagacctgcccccatgaaaagaaagaaatagggaatccctttataattagatttagtgggcagtggtgagatgtagtagagatgaaactttaatagacacatagtctttgggtgatgccaaaattaatctaactttgtgggttaaaatgaattttaaaatttttctaaatgttcatatgtttttctctgtatgttgttagaattgtcatcgggttctttctaaaggctgtgtgaaagaaaagagcaagccaggtgcggtggcttacacctgtaatcccagcactttgggaggctgaggcgggcggataacctgaggtcgggagttcgagattagcctgactaacttggagaaaccccatctctactaaaaatacaaaattagatgggcatggtggtgcatgcctgtaattccagctacttggaaggctgaggcaggagagtcgcttgaacctggggaggcggaggttgctgtgagcctagattgtgccattgcactccggcctgggcaacaagagcaaaactccgtctcaaaaaaaaaaaaaaagaaaagagcgaaaacatctttagtactggttcttgccctaggacagaagtggctgtttgctgtacctctcagtggacactgaaaatgtggatgtgtccagttgcctgctgtccagcaaccctggaagaacttgtgatggctttgtcttcgttatgagaacactttgatctgaacccctttccttttctgaatcctttcccttttttttttttttttaagacagtctcactggctgaagtgcaatggcaccatcttgtctcactgcaacctctgcttcttgggttcaggcaatcctcccaacccggcctcctgagtagctgggactacgggagcacaccaccacacctggctaaatttttttttctcgtagagatggggtttctctatgttgctcaggctggtctctaactcctgggctgaagtgatcctcctgcctcagcctcccaaagtgctgggattacaggcatgagccactgtgcctggcgtctgagtcctccttctaaagggaacccactgcacagcatctggctgctgccaacaaaatgactgccccaccagtcccacaggtgatgagagtttgcaatggccttcacagcttagtaccttagtaccttttctctcctggtaacttagaatggaagccccatgggggcccacgcatatctgcgagggtgcacaggcatgtggcagaatgagccaggggccaccctcttgttctggaggtgctgagagccggcctggctgggggctgtaactgtcaggctgactcccagccacactgtcctccctggagtaggtgctcgaaacctttgctttttgccttttcgctttaatctggaacgcttggggaaaaaaaaaaaacaaaaaaacaaaaaaacaacaacaaaacagtagaccaaatggtgactgagtcccaacccttcttcaggccagatgaaatcatggtccctgctggcgccattcctccatctcagagccctcacttgggttcagaccctcagtcacacagggagccccgccacagctgaagtgttttgtcagagcaagattgcaaagagttaacacttttgctttttcggaaagttatctgtgaagagtattagttgtttaataaagcgtgcctgccctcccgatgaacccgccagtgactctgcagctggggtcattccaagttcacgcagtggacttttgactgccttctgtgtctgtgaaaacagtcggcagctcctgcggggatcattcattcaggcctgtaacacaaaactattgccaatgggcacctgctggggcagcttcccgggagggctgggaggaagataccaaactcatcaggcatctgtggagataagagcggcaggggatccactgggatcccgctaatcaggcctgcacttagaccccactgcctggccaacaggctggtgtcagaatgtattaggcagccctggccaggataggatgtgagctaattaaaggccttttacaaagaggaggaggtagggggtggggagagagagagagtgagagagagagagagagagtgtgtgtgtgtgtgtgtgtggaggaggaggaggaggaaagaagtttgaagtgcattccccaaatttccagcacattctttattcctctgttttatccctcaaaacagaagaaaacaaattagaggctgagcatttggttatttctaacctgaaattgtcattcattgtgcctgatgccgtattggttttaactgctatttttgtggaattacatatactgtgaaagacatcttttgccgcagtctccctgggaacatcctgttgttgaaatgccgttggtcagctgcttgaattttgcccttttctctgactttgacacatcaaggcaaaaataggtacctatttgtggtgtgttctaggtttctcccttttgcttggaaaatccacttgccagctgtgaagggtgctgctgggaggatgaaatgagtcagtgcacagcgtgtgctcttaaagtttggtggttgaggtggcggtggtagcagcttggctctgtggtttaaaatgccacagcatgcactatcttgaaaatactcagtagtcctagcatacaactgggttttagttacacctacttaaggaagaaagctcatttgaaagtgtttgattttcctgtactttcgtttgtttatttagcctgtgtattccccccacccccagtaagcagcaaactaacttatttataggcctcaggtatgtttaaatctgtggtattttcttaatcagcctgataatgatacatttttgaaagcagttttgttcacacataaacctaagcctttattatattattctgatacattccacataagcttgtctgtgcacaaagaaacatttagattaatcttgtactacatggtaacaatcctaggaaattccaatcaaaagccaacaacctgtttccttcattctggactgttggtgggtttgtttttgtctgtggtctgataaggagtaacaacaatgttaattttgtatttccttggcatttgtctcacataatcttttgtcaaagttgaccagtaggcttgtcaggcttgccatgcagtttatgaaataaatagttacaatggagtagttaacttagccctgcggaatatgttagtgtatccttaccgtaagtgtttaaaatgttaattacatttatctttatttctcagcattgctatacagaaaacatgggatagacactgatactgattgcccagttgaaataagttttgaatttagtaactgaatggatagctttaaaaatggtactaatattttgggagactgaggtgagcagattgcttgaactcaggagttcgagaccagcctgggcaacatgaccaaaaaaaaaaaaagtctaaaaaatacaaaaattagctgggcgtggtggcacccgcctgtagtcacacctacatgggaggctgaggtgggaggatcatccgagcctaggaagttgaggctgcagtgagctgtgtttgcaccatcacattccagcctgggtgacagagcaggaccctgtctgaacaacaacaacaaaaagatactcatatttattgactgcttcactatgtgccaggtactgttctgagtcttcatacaaattgatttgtttaatcctcataacgaccctgtggaatgctagtttgtaaatgaggatactgacgttcagagaaattaactaatttgcccaaggttacaaggagagccaggctaagaaccgagattctctgattcagagcccgtcctcttaataccagtgcaaaagcagcactctatctagtaggcttcattctcgaacctctctgcgatatatttgcagggattaaccatgtaaggctgtattatcaaggggatacagagaatttgagtcacagtttaaagtcatttcctgtgctaccctgtgttgtataattagctcttttgtagatgctgtaccatccaggccaaagtgtgtggccgaaaccaggaaattgttctaaccctgtctgagacacttagtgaaggagttttgactttgctctaactctacacatcgagctgactatagatttatgtgcaaaaagcataacctcatgttaacaggtctatttattgtgtctctagagcaagttcacaactatgtatggacaactagaaatgccaggctctgtgctaggcacaggggacacagacataaacaaaacaaagccctctccccttggggtcaccatccagcaggggaggaggacttgcagtcacacacatgtgggaaagtgttccaggtttgagtttggtgtctgtgggggttcctgtagggggatctcaggaaggggtggactcttctacccaggacaaggaaggtctgtacaggggaaggcacgccggtgcccaatcctgaagtccaaggagatgcttgccatgtggacaagagacaggtggggacaagaagaggcacacagggagcagtcccagcaggagggagcctggggtgtgcagcagcaggactagggaggggtcagtggagcttagcaggtgggcctctggaatgaggagctggcctagtggggaaagactggctcattgtacatccctttgttttcccttgtttcgcccccacccaccacgtgaatttaaaggggaagagacttaactgaatgtttcactttttgagcctagtattgttatttgtcatgatttgaccataatctgcatatatacaatgttaactattattttttgcaagtttttttttgtttgtttttgtttttgagacggaggtttgctcttgttgcccaggctggagtgcaatggcgtgatctcggctcaccgcaacctccgcctcccagattcaagcaattctcctgcctctgcctcccgagtagctgggattacaggcatgcaccgccacgcctggctaattttgtatttttagtagagacagggtttctccatgttggtcaggctggtctcgaactcccgacctcaggtgatccacccacctcagcctcccaaagtgctgggattacacgcgtgagccaccgctcctggcctttgcaagtatttttatgtgggtaaaacagttatacctttcactgagcgggcccaaacaaacaaaaacaacagcctgtcacaccgtgtgtgtgtgtgtggcggcgggaggggggtacccaaaaaccctgactcactttttatataattagagctaaaaccaaaccaagtcatggcttgtttgcagtaggtagattgcagagttaccaaactgttctttctgaccagagtgactcagtctagtgcaaagtcatgaactgcctccagcatttctcattaacctaatatctccatctagagtagaaattcaccctccctaaagcccagaggaaacaaactaagggtccttgtgaaaggaaaaggcctttagaccctaaaacaactgattagaaaggcaggacgaaaggagggaggggggcattctttgtgctttcctgtgcaatttggagctcaacagatgaagtgtttgccattgatccccaaaccacattttgggaaactatctgaccccatttgactggccattcaactgttccaccattttctttacacaaagctaaactagatttgagctaaatttgagagggaagagcacattacatatgggaatgtggttcatggttttctaacccaaccctcccctcccccatccattccaatgagtagatttttctctggaaatccatcctttctttttccattcaaggcaactaacagtatccaatttttgattcgtagttttagttttccatgtatagactaaaagtggatgtttatcttgagacaggaatgactgtttttctgcaattgtttagactaaggctaggtagatttcctgtggacttcttggaacctttgagccctgatgttttccctgcgctcaaaaattacagtgctggatggcatctttccagctgttgggatgggagacaggctgggccctttgactcctaaaattgaacttaggttgagctggttggcaaatgtggcaatgaaagggttccctgagcaaaacctgggaaaatatcagtctggatatactctcctagccctggctttcttagcacaccttgatgtgtgttccgtagctgtcttcccacccccatcccctaaaacttgagcatctgtagctcatcacttatgtcctgaactcagtaaactgagtctctgttataggacttagagaaattttcttatactatggactgaatgtgtccccccagaattcatatgttgaaattctaaccccaaaggtgttggtgtcaagaggtcattgggggtgattagatcaaggaattggtgcccttatcaaagagaccccagagagctagcccacccttctaccgtgtgaggttacagtgaaaagatggccatctaggaagcaggccctcatcagacattgaatcagacaccgaatctgctgtcaccttgatcttggacttcccatcctccagaactgtgagaaacaaatttctgctgtttgtaagccactcagttaacggtattttgttgtagcagcatgaacacactgagacagcacataacacagaatgctgtttctttaaaattttcttgagtttttaccatgtggtttacttgtctttttcattgatccttccctgttcagtggggaaacacagatcagcacccagcccttgccgaccacatgaaacctaagatctcacctcctcctccctggcaaaagaagaattagataatgagaggtgttctggttttgagaggaagttaacaagtgttgggacgcttgcacgttagagctggctgcctgtgctctgagtcagaactgaaattttgacatgtaaagaagaactaatatttgatcctctcctgtgtgccaggcatagcgctagccacttcatagctttttggctattcttctccatctcctttctgccagttgctcaaatactttggagtcatccttggctcctttcggtcatgccgcatgtccagtccctcagcagatcccgaatctgaacatatccctcccgcgcccaccttctagtcctcgttcatctttggcctggtttttattgtagtacacttctccttgcacccttgcttcctactactgacattgaacctcagtacaacaactagagtgatcctgtcaaaacataacagatttggtcacccagcccctccagaggcttcccgtttcactccacatagaaaattccagcttgtgcaacctcacgaagcccacgaggtcagcctcctgcaggccttttctgacctggtgcctcactgtctcaccaccctccacccctcaccagctcctgccacactgttctcgctgcttctcaaccctctgccttcaaacgtccactccaaggtctctgcactcagtgttctcttcctggaatgttctatggccacatggttttcatctacattttctttatccaaatgtcactttctcagggaggcccttcctgacatcccctcccccatctaaaattgcagccccctccagctatacctcttctcctcctcccctcttgtttttctacttttgttactgcttttattttacttctttatactatttattttctgtacagctatgaatacaactgaaatgtgacatgaattttcatacaacatacgaattttggagggacacactcagtccatagtatatgtaaatctcatgagggctgaaagttttgtctgttttgttcactgctacatccccagcccttagaacagtgcctggcaaatagtgctaagtaagtttttattgataggagggaagaaagggaagaaggaaggaacagacagacccttggagttaggcattatctccatttatagatgaagacactgaggctctgagaagtttcccaagatcacgcagccaataagtgaaaccactttgaggtcacacatttgaaccctaatgtgtgaccccagagcttttctgatttctactttactgtgctgttttcctatggatgcctcaccctcatttatgtctgcagtgaatattggctctatgaatttgtatgcacatttgtagtgatatgaacacattcaaatgttttaaagggaatactgcattagaatctcttagctccctagatgctgcctgttggatactccactaagctttctacattgccgcccaagaacaagtgatgcctgggctcctctgagagagagaggcgctgagaaatctgtaagcaaccgttactaaatatgtttgccatatttccagttacatccaggcttttcagtattgagggacatcattttgtgttttgattcctggcatatttgctatcagtatatgctttgggggttttcagtgaatgaaaaataagaggtggtgtcagcaataagtgtagaacactcttaaaagatatggctgtagagggaagagcagggctggagcagcagcttgaatgcgagggaaagctaaaggcaggcttttttaaggttgtgtagattaagaggaagaggctgcaaagattgaagcgatgagaaaagagatgattgacagagcagtagtaatatgcaggacagggtcttacaagagcacagaagaagggtttgaattcttggaagagtcagtctatttatgcaatttaaagtgaaggaaggaggccaggcgcggtggctcacacctgtaatcccagcactttgtggggctgaggtgggtggatcacttgaggccaggagttggagctcagcctggccagcatggcaaaacctcatctctactgaaaatacaaaaattagctggacgtggtggtggacacctgtaatcctggctactcgggaggctgaggcgtgacaatcacttgagtctgggaggcagaggttgcagtgagctgagatcgtgccactgcactccagcctgggcaacagagcgagactctgcctcaaaaaaataaaaaataataaaattaaaaaataaaatgaagggaggaaaagatttttttttttctttcgagatggagtttcactcttgtcacccagggtggagtgcaatggtgcaatctcagctcgctgcaacctccgcctcctgggttcaagcgactctcctgcctcagcctcctgagtagctgggactacaggtatgcgccaccatgcccggctaatttttgtaattttagtagagacggggtttcgccatgttgaccaggctggtctcaaaactcctgacgtgaggtgatctgcccatctcaacctcccaaagtgctgggattacaggtgtgagcaactgtgcccaaccaagatttgtttttcttagtgaagtaaatagaatctgtcatttgtatgaaatggggatggagttgaaaaggaatacaaagcaaatctctattgcactcgaactgtgtttcaggcactgtccggggcgggggacagggtacaaagatgaccagggtggcctcctgtcattaaagcatggacgccagcttttcagcattgtatgcagcaccccaaccagccttgtgaagaaaagagatatgaacaaatggtcacacaacagtcggatacccacactcagaaagccacgtgcagaggcagcacagtgggtagaagcagtggtttgtgtgcatggacaggcattcctgaggaccaggtcgaagttgagaagtcacagatttgaagggttcctgctggtggcaggaacgataaaagtagtagctgatgttggcacgactccataatgagctgtccccccaccttcctgctagatatttccatctggagtcgcaaagatctttcttcttcaatccaaatcaatacctttcatctgttgttttctgtttaagcgatagcagtcatttgcaagatatcattggtcatctaaagtctatgtggaaggaattaactgaaattcattacttgatcagagagtattttttggtcccatctttattttgcttctttttctttttttcttgcttcccaggcaatgcatagtccttataccactttatctccatttgccttttcctatcttttttgctgttattgtcatgtattttagttctacttatattatgcttaaccctcataaaacatgatttttttagcttaaataattgatataatttagatctctacacatatttatcctgtatattggtactttctgagtttaattttaataagctgtgtccttaaactttttagagtcagatctctaaaacaacactatctgatagaaattctcttgtcagattaaaaaagtagaaacaagtgaacttatttttaatgttttgatttaactcattatgtttcaaatattatttcaatatgtaatcaatatgtaaaaattgatttatatttttcccactgtctttgaatttattatatattttatacattgtatagcatatcttaatctgtagtactaatcaccttctaagtgctctgtagtgtgtcaacttattggacagtgtggctgtaaacgaaggtgaaactaaagttacatgaaacaaacttatattgtgtgtttcaacagaagagtttcaagtttctgtggctaacttgtttgaatatacaagttattataattctccattactatttagtcagcttctcaaaacttttgctaagtgattgtttccaagatttcccttactttttttttttttttttccttttctctgtagacagggtctggctttgtcacccaggctggagtgcagtggcatcatcacagctcactgcagcctttacgtctcctgggcttaagccatcctcccacctcagcctcctgagtaactgagactacaggtgcatgccaccacgcccagctaatttttatagagacggaatcttgccatattgtctagattggtcttgaactcttgggttcaagtcatcctcccacctcggcctcccaaagtgctgggattacaggcgtgagccaccatgcccagcctaaggtttatttcttaaattgaattctgcctttggtagcatgcttagaaaacaagttccattacattttttaaattgtagaagagttgatcattagaatattgcgtagtatatgttcagtttaaagaatgatgaaatgaaaacaaggacctagcacttagcttagacagtagaatataccagtacttttcaagccttccaggtgacatcttcttccttcactttataccctgaggtgttcactgtcctgaatattgttttaatcaaatctttctcttctgtttacagttttaccaaacatatatttttaattctgcctgtttttaactcacatataagtcatactgaatatattcttttgtgaccttttgtcacttactgtgacatttttgagattcatgcatgttgatatatgtagctgtagttcattcattgtcactgctgtatagtattccattgcaggaatgtgctacagtttatttattttactattagacatttggactgttccagtgtttttgctggcatgaactgatgttgttacaaatattcttgttcatgtttcctgcaacacatataaaagtctctccattatgggagttacttgattagagagtattttttggtcccatctttattttgcttctttttctttttttcttgcttcccaggcaatgcacagtccttataccagttgacctccatttgccttttcctgtcttttttgctgttattgtcatgtattttagttctacttacattatgtttaaccctcacaaaacatgatttttttttttggcttaaataattgatatccgttagatctctacacatatttatcccgtctgcgtcttttattcttttctttgcctatccatacctccatctgggcccttttccttctgctaaagaacttccttttgtggctcttatggcaatgaattatctcagttttgtttttctttttttttttttcttgagatggtcttgttctgttgtccaggctggagtacagtggcacaatcttggctcactgcaacctccacctcctggattcaaacgattttcccacctcagccccctgagtagctgggattacaggcacccgccatcgtgcccggctaacttgtatatttttttagagacagggtttcaccatgttggccaggctggtcttgaactcctgacctcaggtgatccgcccgcccatcccaaagtgctgggattacaggtgtgagccaccgtgcccagcttcagaaaacatctttctttcacctatatttttgaaagatatttttactatgtttattctttcagtcttttatgatatcatcccattgttgttccatccatttctcttgaaacagctttcagtattattgtttgtccttcaaaggtaatgtgtccttttttttctttgacaacttcaagatttactctttgtttttagtttctattaataatatgcctcgatatgattctcaggcttgggatttgtagaacttcttgaatttgcagtgaagtctttggacgattttgggaaactcttggccagcgtcactttaaatattgtttctgcccccttttttttctttcttttccttctgtgactccagttatgcagaatttggaccttttttactatgtcacttacacctctcatgctcttttctgtattttcacccccttggtttttcttcatgtttcatctggatattttttactacctcattttctagtttgctaattctgtcgactctgctgtttcaccatttactaaaatcttaatgttagttttctggtaaaactgtccatcttatttttcttctgaagatagtaatcatactataccagtgatgaatcttgtattttttttcttagtcttcagtcatttagtcctgttttcttacatatctggaaattttaattgaattcctgacattgtataagaaagattttagaggttctggccaatgttatttttctccagagaggagttaaacttcttctttccttctacctcagatacccagtttttaaattttcccccatgcatacctcccctgcatttttaactttttatttgcggcaaggggtaaatattagcaggagtttcccagagggacttgtatttttgaaaggatcaaagcctgatgcttaaagggaagagtctagaggaaggattctttttcttgggatagacaatagaaagatgaggtcagagacagtgtgtgtgaggtagaaagtaatcagcttcaacccctggagtcacaacagaggacttaaggaaactgagtcctgaagaatccgttctgcttaagcaggaaagttggtgaatcttttttataaacaagggttaattagttctcttctaagtaaaaagtacattgaaccagatctctcattttcctatctttctagtcgttgaaggttttctcttaaaatcaacaaaaggcatcaggataggccgtgtagccacctttggaaagggcagatgttgagttaagtggattctgttctcttccatagtccaggacttttcagacctgaaatcagttaacctggagatgactaattcaggttcaagacaccagatctgctggaagtagatgggtgtgaatttttaatgtcctttcccaggtcaccctttgtggattgagagatagcaaaggttggaatgacgactgaaaggccactgaggaatccaagggacatcctaggcaaatcctaggcaaagaccagaggtttctgaggaactgttgggaagtagctaagctgcaagtttattcctattttagcccatctgaaaaaaaatgggaacatttgagttcatttttaaaagaaccttcttttgacctttcatttgagcctgggatcaagccagttttctaaagaaatgagacaggacttaatttaagtaccttagatttgaactacctcccattcccattctacctcctctgcaaaagacaggttcaacttctttgttctcccagatgctaaagaccagttcccaattggtggtcttacccagatacatgacacttgtgtataaataacttccctggacattgctagaagtgaagtatcagctttgcatgtgtagctttcccaaaatgcaggtctatcctacccaccaccataaaaagttagttgttagaaacaatagcttagtttccactgtgaatggtgtattactcttagatgggtcaggggtattttgaatagcagaagactggcaaagatcagctggacatggtggctcacacctgtaatcccagaactttgggaggccaaggtgggcggatcatgaggtcaggagtttgagaccagcctggccagcatggtgtgaaaccccatctgtactaaaaatacaaaaattagccaggcatggtgtcgcgtgcctgtaatcccagtcactcaggaggctgaggcaggagaattgcttgaccctaggaggctgaggttgcagtgagccaagatcatgccactgcactccagcctgggtgacagatcaagactccctctcaaaaaagaaaaaaaaaaaaaagaacaatggcaaagatcaagaggaatgaagattgaaccaaatgaactttcaaaatcttctttttttaccctaggagcatggttggttttgcctgctttctctctatagtcctctttctctccatagtcctctttctttccatatccccctatatttgtatctccatatatgtccattactggtacatgaaacaggcctttccagagcagtagcttcttttggagttagtttgcttgaccagaccagctctaacttagcaaatgttttagctttggtgttctacgtccttcaggaaatcattctcctataagaagctggggtggaagaggagacctctcctccataggcagcacctcttgaaatcactggtcccaatctccaccccagtctggcctccatctttcttcctagtataaatggtacatactagtaatgtaagctggtgtggtgtgatgtgatccacataacggacatgtaccaagcctcctatttctttgggacctgtttcagattgtcagagtagtagctttgggaaaagaagtagattctaggccacgtggcctccggaaaggtctgggtgatggaagtgggccaggtgtctgagttacggatatggatcaagaaagaacactggagcctgactcctcttccttgtccagatatttgcatgtaatttttcagaaattttttaatatacttttgtcagctgccttcctttgtcagttctgctacttgggagagaaaagagatatgcctgatatctctgtataattttcactggcatttaggaaggaatttttctacgaagacaatagcaaaagtcatggttgggttacctctctaggttacccagtatcacacatagatacttagcagacttttgctggaaatgctcatggtctttccagctttatctgtaaaatgagcataataatactacctcacaggattgttgtgaggattaagctagttaaatatttcattgatgagaggccccaaagacagtggctggcacatgacgaacgttgttggctgatgcttatgattccagaagttccactgtggtcttcagtacttggaagtttgcccttacctactctgccacacactcatctaaaacttaatttatttaaagaaatagttgggaacggatttctttctaaaaacctcaaaaaacttattccaaacccttgaaacctattttacttttgccacaagaagctcagcttatactggtgcccagcatctatgattattctctctgatgtcatcagcctcctttcttctaagcctttggcattaaagtgaatatatttattcatttgaaataaatacaaagtactttgtaagaatggaggtcttgtgactaggaaggagatcatcttgagcttcttttctgttgaggaatgttcggtttcatttctaaagttctgtattttgcgattttaattgacatatttatgctttcctttgttccagaatgggcatgaggtgatttccatagtttaggatgagacatgcaagattcagtgggggagaaagaggagggaaccggagagcactcattggaagaaaggataggatttccagtaataaccctttgatttgtgtttttttccaagtgctttcgtaaccaaggtcgccgtgggtaactccatgggtggtgttctccctgttttgtagatgaagacactgattctaaagagagtgtgtcttttgctcatgttcacccagctgatactaatgacaagagttggcatcaggactctgcttttgagagcctgtgtgttttcttggagttgaaataagttatctgccaaatcaggctttatggtgtgaccgccatagagggaattttttttcctgcattataatctatctcctggttcagtactgaggcacaagctatttatgcaaaaaccttgttagaatggcaaaacaggagctctcatggggtgggaaggcatattccccatggccagtgctaactgtatggaaacctgtcttcaggcttccctctgcatgcttcatggggtttcagcaacagacaagtaggggtctggcattttcaacataagcataccccccttctgccaaaaagtcctacactgggtcctagctgatgaagagctgaaaggcaggacacaattccatccacagctgggcttcaggattcatccttccttcataattctttataatcaatgtagaaaaactatagggaaaataggatttgactaagccccgacttctctatgttgaagatcagttgtcttgattctacctgtgtacatcctgcttatttctgcggtttttactttatagcatactccaccaatcctttttaaggaaaaagcaaaatcctattatgggaatgcttcaaaccactctgagcttccagattaatctgaaacagcatctgagttcacaactgggtcagagttgcagaatagcaagagaaacttgccagttcagcaggcgtgtgtcttgggttagttaagacagcaggacagtcctgaggcctgacttccttgcatgtgtttcaaccttgggtgctgagataattctgggtggctttagataactttgtttcttaactgaaaaaggagtgtctgttgcctgataagtgtttatccgtgaaatagcaacatggtgtgcatcttagggtaggagggcttttagatctccagagaccaggaaaaaaaaaaaagcaaggtcattggcttaggcatattactggaattaggatgtcagtcccaactttaaaatgcctgtattgtttttattcagggtcccctttctggattcctcccctttttttctctttgccttaagggctatacataatccataaccaagtagaactgaaaacagacaaaagcactcctcttctagtggatagaaatctggaatccagaaatgcttccttcttgccaaacctcaacttgttccgtgccttttttttttttttaaatgcctcttcccagcctccccaccctttcgtgatttggctgagtgaggactagctgtttggtttgccttttatcaacaatagatattcactgcttttcaggtcacattttcctttaactcttctctgtttatgagtatcacaaaagggttcttcaacatcaaggcaaaactcacactcagaatactttttaactgtggatattttgacagtatgaaacggaagtcagtggtgaagactttcgttttgaagtgacttaggtcttacatgactcaaagatggttttcctagtagtataccagcagagttgaaaatgactctgaaattgaaagtcccatactacttctaagaaacttgtaaaaagtgttggccaaatgctacaccaaacattttgcattaattattctcttaactcttcaaaacagtcctttgcaggccaggctcggtggcttatgcctgtaatcctagcacctcgtggggccgaggtaggcagatcacatgaagccaggagttcaagaccaacctggccaacacggtgagaccctgtctctactaaaaatacaaaaattagccaggcgtggtggcacacaactgtaatccctgctacgggaggctgaggcatgagaaccgcttgaacccaggaggtggaggttgcagtgagctgtgatcgcaccactgcactccagcctgggtaacagactgagactcagccagcaaaaaaaaagagcaatcccttacagtagaaagtatgtgattttagcagatggataaactgaggttcagagaaattaagcctcttccaccagcatgcgtgtttggtaactgtcagggtaagatttgattcctttgctcctgcttgtttgactacatcgtggcaactcccacaaagttcatggcagccttacttagaggcacaatagatagttgggttttccaaatttatgagttcagacatagcttattgcaggcaatgctgattagaattagagctgtgctggtagctgaggtttgcagctgtacaaccttgtatagtctctgacttgtggtggtttaacttacaattttttgacttgacgatgacgtaaaagctatatgcattcagtagaaactgtacttcagattttgagttttgatcttcctgggctggtgacatgtgatccgattctgtcgcagtgctgggcactagggcagccgcagctcctagttagccacgtgatcatgaagagggaacaaatactctacagtgggccctgctgccagatgacttcgcccagctgtcagctaatgtaagtgttccgggcatgtttagatatgttaggtgtatgaaattcatttttacttaaagccttttcaacttaaaaatgggcttacccggacgtaatcccatcataagtcaaggagcatctgtacttggaagaatataaaacttctccatcacactacggagtcctgccacttctctcttttcctgttgtatttggttaccatcttccctggtgacaaggaagatactgccaccagcaattactcagtgaggcaaagatattaaagaggaaatttccattaggtaaataactgtgaaagaagaacccaagagaagggagagaaattcaagccccagctcctgttacactggccaaatgcctttggcaccccatgcttgctgaagatcataaaagggtcaggtaaactgatcagacagaacagaggaacacagtgtgaattttttcccttgccccattccagtgtctacttgaatttcagttttagaaaatcaacccttcggagccaggccccaaacccaggctaatttgcagtgtctccatttgtgtagacaatgagattattttgggaaggagggtgttgacagagtgtgtgttagctattcagtagaactggcatcttgaagtacttctgagatttttacccccttgctgaaaatattgctttatagaagttaatgactttggactgtggccagaattcacaagtatggcatgtgttgaagtgaaaggaaggggaaaatcattgtctttgtgagtgtaacactagattttctgaaggacattttgttccttggaacctttcattttagctagaacaacatgcacttgaagccttaagtattttgtggacttgagattgctacaaaatgaggtaggcagacttaagtctctgcaaatgctccttctggtgttaaggtattataaccaaagagttacaaattgtctgcagattaccttccagttgctagtcgctttcccagtttagaagcctagcacaccctggtgctgttatgccctgctgcagatagcttccgctttgctggggggatatgccatgccagatgctttacgtgcacactatccctgaatcctcaagacagtcctgcagaatctgattattcccattttgcatataaagaagtcaaagtttagataacataatactatttttattgaatgtctcatatgtatcaggctctgtgctatgtgctttacatgtattacctaatccttacagcatctttgtagggaatatttgtatccccattttgaaaaggaggaaaacagaggcccgcaaaggttacttgtctgtgatctcatagctgttgggtgtcacagtcaaaattcaaactcaggtgtgattatctttctattatgccacatccatacttccctactgaggtcttgaaggcaagagacagaaaccacttctgatttctgattctctgtctctagcctgccgtacaagtagggcttctgcacatgttggattgcttggttgactgggtgtgtagtggatttgtacttgctcatatcgggactcatttttccttcgtctgaataatctggacctctatctccaggctttacttgtcacaagacagtgggaggatgggatcatgaaggatggcctgggccagtcactccctacatgatggtgtagctcttttgggtatctctgccctgttttgatgaccatcttcaaagtcaaggacctgggtaaaatagtgcttccaagcttcagagaagagcaaggccagagggcacccatgatgagcaccactggaattccctccctccacagcccacttgttttctgctgtctttgagggagaaataatggctgggcaggacttaccttcccactgaggtggggaatggggtagaattaaggatgcctaactaaatgcctccatagtaaaaggaggccacatgctttatggtagcctggattcaatcctcagagtgcagtgaactggcccagggccctgcctttaccactgtatccatcatttggctggctttggtttagtttctgtaaaacgtctttcccagtaaaatctgattaactactcatcaatacaggtttggttggatcatagatttcaacatctactcaagttttctgggttctcaaagctgtatttctaggggtgaagacttttgtaatggttgactgttaacaagtggcaaaggacaagtccagttggcttgcataagcaattttttatggacagagaaacaggaattcagacagaagtcctacagtaagttgagataggtgtaggtacctttccatggcaaaggtcttcatcttacggaagaatccagcattagagggaagagtgatctcttaggtcatctcatcccatcctccttgggtcaatacattgtctttgtatagagaacacccaggacccagttggtgctggggagctgaggctgccacagcagacttagttggaaattaagcttttggcataggctcactcatcaactttggatattaattgatgggagtagaagaagagggagtgatattgggtattctgcctagattattctcccatattctcttggtgggggagtattataggatttttaacttcctcctagttagctgccagagataggtaaagagcactttaccctatctgtcttccaagaaagagaatgtaagctcttagaaagaatataagagcttgagagaaacaggaaagacctgaataagaccctgaattggctgcggtgctcctgggtctcttcaggtggagatgtgtcccctggagacacacaggacatgggcacgcgtcacttaactgtggttctcacagcgtctggggcaccagagagacacgtttttgtctggaacctgaagaacgctggcagcctacataattctaaacatagcaggcactcttattgattctttccaaaacaaaggtcacatttcctttctgtgtagtttgtgtcctgggttcctgctgactgttttgtgtatacgattgttaccttctcaaagagactgtcagttcttgagggcagggttcaaggctgctgtttgtttgtgttcttcagcagtacctaaatctgtcctgggctcagaggaagtatttagtaaagacattctaccttgggttgtaggtcacacagtgccagagctggaaaggattttggaaatcgtagagtccaacactctaattttgtaagtggtaccactccaaaaacttacttgggaggctggtgtttatctgctggaaagagaggattttattatgttaaactatagtgcaaatgaccataattctaaacctttgacaggcttccctcaaacgctgcaggcatgttcctccttggactagtagcagagtaataagaacagtaagaatgctaactagataccaggcccccgagccattgtcatgaatgcttccagccacatgacaaagtaggtactctggctattctccagatgcagaggaggctcagaggtaggtgacctcgctcagggtcatgtagttaccagaatggtcgagggaggactgaagtttggtcagatgccccagcttgtggcccttctcctatactgtggtaactctcagatggggtctctgactgaagccactccttagtgattcacggtgctagctttgcagcgtcgtgtggtgtttccagttgtcctaaaggaagttattaattttcattaactttaattctctcattagacaggcagtgatatggaaggcaaggcagaaagcaaacaaataatgataggggttacatctccagaaaggtcaggaatcactgccctaggttgtaaaatatttggactgagtaaaaggcatgagtcttcccatagcttcttccaggaactgttgctttacatggaattgctgctgtgttcactagtccctcttctgtgcccagaactcactgtcacatgtgtcaagaatcctcatgactgaggtttccagggcagatctgatctgtgtaacacgcaccctaacccccttgccaaaggagaatgaaataggcccctagatggccacccagttcctgggccttccaggcaggcagcttgccttgaggctttcccctgagccttgtatctaaggaacattcctgtgagttttctaagaggttagtcctgggtcattggcacttaaaccacttgttttggtagatccttcctgagaaggttaattatatatttgatatccttctctttttatgcctgaatgatgaggataagtactctgtggtttattaactgtcactttaaaccttttcagattgtcttgtgacaaaacagagttttatgtcctttttatcccagctttgatggatgagacagcttttctggttaaagtatgccaggataaataaaatctctgaattgtggaaagggtgggtttgcatttgaaatcatgagttcaagtctgccacctcctatgaacggtgacctaacctgttaatctttccatcgatttcgtttttggcttttgacaaatggagcttggcacctcataggtactcagtaattattgaataaatgaaagacagcattactggagggagtttgatgtctccaaatatttgataccaaaccctaaagcaacaatctgacacatttcctgttttgaattccactaattcttagagcaaagagcctatgttcttaccatgatacagtcctgaagctcacttctccctcaagactattttgttatacctctgattttttcagtaaatttggagtagtattctggaaagtgaatgtcattaaagatttttagtagttgctttgcaaagcctagtgtcctccattgtatgcatcccccaattggtatgtgtccagtccttttgagaaccactcaacctggggcagacagtataggtaactgcatttaaaatatttaaatttatttatatttaaattattggccaggcacagtggctcacgcctgtaatcccagcactttgggaggcctaggtgggcagatcacttgaggtcaggagttcgagactagcctgaccaacatggtgaaaccccatctctgctaaaaatacaaaaattagccaggtgtggtggtacacacctgtagtctcagctactcgggagcctgaggcaggagaatcacttgagcctgggaggcggaggttgtgatgagatgagatcacaccactacagaccagcatgggcttatctaattgtatttaatttaaatttatttaaagtaattcaaatagtaaaaatagtgccaagactttaaaactcttctcctgcttttaactccttctagtttgctggaacattatcagatggcttagggaagacgatggacaatcggcatcagtcagagcgggagtacatcaggtaccatgcagccacaagtggtgaacaccttgtagccggcatccatggcctggctcatggtaagtcatgggtgacatcaggctctgctgctgctggtcctcagaggcgcctttgtatcaatctgattgcagctataaaaaaagaaaggtgggctgggcgcggtggctcatgcttgtaatcccagcattttgggaggcctaggagagtggatcatgaggtcaggagtttgagaccagcctggccaacacagtgaaaccccgcctctactaagaatacaaaaattaggccaggcacagtggctcaatcctgtaatcccagcattttgggaggtcgaggcgggtggatcatttgaggtcaggagtttgagaccagtctggccaacatggtggaaccccatctctatcaaaaatacgaaaattagacaggcgtggtggtacatgcctgtagtcccagctactcgggaggctgaggcaggagaattgctcgaaccctggaggcagaggttgcaatgagctgagatcgtgccactgcactccagcctggcaacagagcaagactccaattcaaaaaaaaaaaaaaaaaaaaaaagaaaaggctgacaacagaggaaatcctgtgttggcgtacctgatagccttccaagctctcttactttatcctccttgcagttgaaatacgacagccggtgagaactcctcattcgctttctgaatgttgtgcacattgcaattccttttcgttctctggcttctgttcccaaagtatcataaggtgtaatcaaccagacctgttcttagaattgtagctgctacttctcttagaattgtaacctctgccttctccttactgatcattccttccaaagaaattgaaatgaggaatttgtggccaggtttgtagcccaggtgttttttagttttacataaatgtgcattcactaaaattataaatttatttgcctaagagatgttggtgatggcatgaatgcatttggtctctgactttgaattcttttaatgctttaattctgagtcatttgccttttgttgcatttttcttaacaatttcttagtacggcatccaaggcccttggaactataaatccagccaattttccaaccaccatccttcagccatgctgcactttggccacacacagctatgtactgcttcccaggtgtgcttccaagtccttgctcacacatggtccttctgctctccctcctctgcctcatttccttgtctatcaaaatcctactcagcctgtaagtcccaactcaatacattttcccagctctattgtccctgttagagttaatgacagagcacagtctgggttgtgtatgtcaccagctgtgtacatctgatagattgagaatgtgaggaggggagaaggaccactttgcattcacctttctccttgtgtacctcacatgacacctggcacatagctcatgcatagtaaggcttagtaaattaaactctttgtaccagatccttaggaaccatccaaagctatcagagtcatatcaagactgatcagtattaattatctgcatttggaagaagaggaaggaatatagacagtaaaatattatatttctatttgtgcttaggacacgtttagaatagagtttttgtttatcagctttcctaatggtgagatttggatcaaaatgcctttgcttttcctaaggctgcccaaccgtaaagggagctgtccctaaggagacgtcaggccagaagtgaaatttggctgaaagtaatttgtttatggattttaaaagttgactgttgggcaatcatttggggttaaggtttaatcattctttctcgtaatggtaatgacagtacattggactcttagaagacttttaaaatgaatataaaatgctttgttatgtgtggtggcctttatctggccagcatccttgtgacgtggagagagcatggctctcctcactttctggatgaacacacaaatgtgctgagaaaatgcatgattggttcaaagttgcaaaatcacctcccatcaagaatcattcctataatatgtacagcctctccaggagccaatggcttcatccaaagaggatccactgagctctgggttatacgaaggcagtatcctagagtgagagtcttcccttaggatgaaaagacctttagaaggtgataagaaccagaatccactcaatccccttgatgtaagaaatgggaattgtgctcagttctctctgcaggccttgctggacccaggttcagtcatgttctgtctctcaggtcccagtctgaattcctgttctgtgtgtgctctgccaaaaactttgttcaaaagtttgggaaagggctgggtgcagtggctcaggacagtaagcccagcactttggaagacctagagggagaatcgcttgagcccaggagtttaaggctgcagcaagcggtaatcatgccactgcactcctgcctgggtgatagacggacaccctgtttctaaaaaaaaaaaaagtttgggaaagagatattgcctcactggagcaaatttacccagaatccaaaagaaatgttgtgaattgttagtacattctcacccaaggagtttcctttaccaatttgtctcactagagctgaagagtctagagagcttcctcacaccccactgtcagagggtaaacatcctgtgagtgtccctggcacaggtcctggagatgctccctagacgggctgcctcttcccttcagtgactgtgacctcttcagcctctgccagcttctggcctcttctaaggtgttttcagccattgctgtcaacttgcaaaatgtttggaatgcctttttgacctggattggtcttttgaactgactccattgagggtcccagccagctttcacagctttttggggtgctcttcatgaaggttttatataatcgccgataccgaatttcatcaaagcatgcagtagcttttaccttatttcaagcatccagtggggttggccagtcacccccatagtgttctttgaaaattgcaaatgtataccatcagctctccatatccacagattcagccaaccatggatggaaaatatttggggggaaaaaagatttcacgaagtgccagaaagcaaaatttgaatttgccacacgtttcaaatactgtattgactccacacaaatgaagtgatatgtgggcatcgtattagctacaataaataatctagaggtgatttaacgtatacaggacggtgtgtgtaggttatatgcaaacacctacagcacattatgtaagggacttgagcatcctaggattttggtatctgcaggggatcctggatcaatcccacatggatactaaggaacaactacatttagttatctctctctgccttagatatctttcttttcttttctttttttttttttttttgagacagtctcgctcggtcgccagactggagtgcaatgctgcgatctcggctcactgcaacctctgcctcctgggttcaagcaattctcctgccttagcctcccgagtagctgggactacaggcacgcatcaccacgcccagctaatttttgtatttttagtaaagatggggtttcaccatgttggccaggatggtctcgatctcttgacctcgtgatctgcccgccgcagcctcccaaagtgctgggattatgggcgtgagccactgcgcccagcctctgccttatatttcataggatgccatcatcttcaaactttccccgaaggcccaattttctagtctcctgttgatttaatcctctatctgtatcctctcctgatcgtccgtaggctgcccaagctctgggatcgaaaaattggccactgttaacctctcagcttttctctgatttttttttttttttttttttgaactggagcacactttacttctgactaacatgtaacatatatcctctgactctggacttaatgggcaaatctgcaggatcctcttctgtgagttggcctgtctgtggcctctctggcacagagattaatagaatggccttaagttatcattccataatcaaggggtttggctttaaatgcttttgcttttgtcctcgtcaggttacaacagcccttgtctttttcactaggtatcattggtggactgaccagtgttataacttcgacagtggaaggtgtgaaaacagaagggggtgtcagcggtttcatatctggccttggaaaagggcttgttggcactgtaaccaagccagtggcaggcgccctggattttgcatcagaaacagcccaggcggtgagagacacagccacactcagcggccccaggtcagtggtgtgggaagaatggcttttgcagtttccagcctaggtctgctgcttctcctaatccatactgatgtgtttaattgtgcactttcttagttatagggtttttaattcaaatacttgtaactgaaatttctgatctgcctaatataaaaagatgaaaatgaggtacagaaacctggcatgaattttttcagataaatatatatatagcatattttatatatgctatatattttatatatgtatgtatatatagcatattatatataagtatgtataactatattatgttatttttctccattagagaggtcagaattaggattaaactgttagaagcttcttctgttcaccaagccaactggatccccacatgcctatgaagaaaactgtcagattgtagtctggttcttactcctacaccccgtgatatagttctagaatccccactgttgttgttcaccatgtgggtctgttccttcttaattttccttccgcttgaaagtatcagccccaaccccataaagaaaagtgccaccccccatccccccagcaggtcagcagttctgctgtgggattgctgtctggccttgataccagctgagactggaaatcagggacagcccatatggttccaaaccccacagaacccaactgctttaacgtagctgtttgcttgaatggcctattttagcctcccttttccagagtgactaattggggattcttatcaacaaagggtataatgaatgttaagggcccagccaagctagactcgacttaagcccagaaggattttgctgctgcttggataatagattttccctgagtgaattagtacgcccttttagaatgcctagggcctggcccacatccacaccctatcactccctcaaataggatgtgaagtgaaattgtccccaattgaagtgaatccatttgtctgtcaccaggaaaacttactgaagacacattactgcagtaggggaaatgctccgattgtggactggggccatgcagtgtgctgtgccagaatgccttccatctggaagcagctgagtaaactctgtatggtttactttagttaagttacattctattctcagatacaaaactaaaacaatccttgagtatattttgaagcatttatgaagttgtggggaggggcaggcagtgaggaggcttcgaaagtatttccagttagtttttccatctctgctcgaagcccaagaagtccacctccagtatttgttaagataataagacttaatgaagtgtaaagctgaagacgcctaagagttcccaaagaagcatgtgtattcttaaaatgtcaaaatagccaagggattggttgattaaaaagggttcaaggtatatgtgataaattttttaaagatgattttgtgctgtgaagttttaataatgttgacgagaaagaaacggcttgaattttatacattgtcagcttgcaagtcttcatgggggtttttcattctttttaggagcacaagtaatgtagccacagtcactgcagaaagaatgtctttgagagggacattcttgtcatttttattagttgttcaacattgccacagaagtttgattttctgtcagccagtacatagctgccatttattcattgcctgtcagtaaatagtgattgaaaatttcctatgaactcagggttgggaatagcagaaaccaaaactgtctctggtctcaaagagcttataatcaagcagggcagcaaacataaaaaattatataaacacttatttgctgaaattgtgacaaatgacatcgaggacacttagagggtgccgtgagactatgatcagagaaggtgatggggagaaggagggtggctaacctagtgatcaggggagttgagacaggcttttctaggaaagtaatctttgaggtgaagcctggagtatgaagtaggagttggccaggtgaagagaagagagaatcaccttccaggtaaaagggaactactgtgtgtgcaacagcaaaaggaaggaacttatctatgtgccaggcattgtctttgtgcctccacgtgtggaatcccatttaatcttcatagttgatttacaaatgaggacaagacagtccagagaagtcatggagcttgtccacagccacacagctggtgggaaatggtagacctagacttagacccagcctatgtcttgaccctgtgcccagcaccactgcattgcaccctgctgcctgggtctgcgaggagggggctcattggatttctcttgtacgtgtttcagagtcagttagtgtcaagatatggcattccacatagtttcttccctgctgactcaagatttactttactattacctgcacactgacatgattcaggtcttgaccaacactgcatttttgtctgtctgtttcctctggcctgccaccttagccttatctggacctcagcagcagagaccatgccctcatgaaggcactggggagccgttcacagtcagcactggccactcctcatctcagcccaatgaagttttacatttccatgtagatgaggcactcgggatatagaaaagttgtgcagcttgactcaaagcagacagtaattgggtagcctaattgaagtttaactgcaagttccaactttgtaggctgcagaaaaaaaggaaaaaaaaaaacaacaacaacaaagtttaactgcaagtttcatgagacagcgatctgcctaaccattcactcctcctagaagcaaaagctaccgtgatcattgaggcacagccggtcttcatatatcctcaaaggagggggattagcttccacatcccttctctattcctggaggtgccagtagtgggagagtcatggcagaagttaccagaggcaagtggggcagaggcaagtagggtatatgtttggatcagtggatcagtgtcctttattgtgcagaaaaagctaaaattacagattcttctgaagggatacatagcagccgtttcaccaatgtccctcagtccatttgtccaggtccagaagtattcatgaggagctatgcgttagaagagagcacttgggctgggcatggtggctcacacctgtaatccagcattttgggaggccaaggtgggaggattgcttgagcccaggagtttgagaccagcctgggcaacacaatgcccccatctcttacaaaaaaaaaaacaaacctggatatggtggcgggtggtgtgcacctctggtccttgctacttgggaggctgaggtgggaagattgctgaagcctggaaggttgaggctgcagtgagctatgattgtgcccctgcactccagcctgggcaacagtgagaccctgtcaaacaaggaaagagaacacttgatctggaaaacaacaggccagagtcccagccaccttacttattagctttgggccctgggtcaagtcaagacatctatgtaagactcagttttagttttttcatctataaagtggggataaatttatctctctgtttattctgcttctcaggggtttgaagcccaaccagagttattttaatgtggaagctataaagaactataaaaatgctgggtgatattattttaaagtcctattaaaggagcgcagagatccttgcaggtggagaaatgtttcagtgccagtttgttctgatgacactgtatctcttaggaacatactggctctaacactatcaccgagggataaatcaccctggtttcttggaagtgagttataaccatctccaaccatcccggttgattgaacaggatccaggggtgttactcagggtttttccccactgtttagacaacagggactaacaaatgatttgaagggattagaagtgagattctgaccgagggttgacctgagcccagggaccaagccaggaatagaacccaagagtccaagagttctgcctctgagcctgcaattggaatgagactttctgcttcctttgtaatatttcatccaagtaaaggcttagatcttagcatctatgttttaaaagacccaaattttaagcagatgataggaaagtaagccataaaactgtgaaagagtactccttccagtaatccatctgaaaagtggccttacaggaaacattggctcttttttgtgtttatttgaacatgattttatttatagggaaccccccctccttatgttcttttagattaaaatacttccaagttcctctccttgttggagtgcgctggcattccaagcgacagccacctaactttcctctgaaatttccaggcaacccaatagttctcaggaaggcaggtgggggtggggagagaagagggcggaggactgcagagcctttggcctcaacatgagtgttgtggaccaatatcccccactgcatttgttcactgtacaagtatgtgtggtttggaactgaaataagaaaccttttccaaggcaacgttctgctggctcaggttgcatcttctggcctacgtgtattgggccacactttgtctgttcccaagtaaagtttatgaaaatggcacagatgcagccacacttgaggtgccactgaagctatgtgaagagcctgctacccttcaaacagaccaggcccaagcaaggtgccaagccatgtgagagtgcccagtccactgtgtaaatgtgacggcctttgatggtagtgtttgaaaagatacttagtagaaagttgcagagacccgggagcagccatttcacaaaagaaggcaaaaatacctttgagaagaaaggaatgtctgcctctgcactatgtatttgcttgtttgtttctccaaataccatctgttgcagactggggtgcatgacattttaggtaagtagcagatgaagatttatgaagctgggccctgaggtttcctctaaaatatttcttcaccttttaagtcaagacccaaaagtggggagagaagtaggagttggcagaacttgaaatatttaaactaatttagcaaagctcaggagtgttggagcttatctcgttatttaagttagataaggaggaaggggaatttgaaggataatgatagatcagtgtttaagaatacagccatcaggactgataatgttctggaatcccgggaccctcggattgtgcacgtagatgtaaattccatttgctctgagaacttttgaaaaagaaagtttttggttgatttcacagaaaagatttatggtgggcatatttgactttttcagtaaaaatagccccaaaacaccacccaaaatctgttaagacacttctcgtgaatgacctcttagatgtgaaatggaaatgggttttcttaaggaaaggccccttttgttaacaatgtttgcatgttacttatgactctccaggataaaaggactaagactcttttgggtcaccagagcctgaatgcagtcaggttggacaggtcagcaaaaagtctgcaaagaggccgggtgtggtggctcacgcctgtaatcccagcactttgggaggccgaggtgggcggatcacgaggtcaagagatcgagaccattctggccaacatgtcgaaaccctgtctctactaaaagtacaaaaattagctgggcgtggtggtgcgcgcctgtactcccagctacttgggaggctgaggcaggagaattgcttgaacccgggaggcggaggttgcagtgagccgagattgcgccactgcactccagcctggcgacagagcgagactccatctaaaaaaaaaaaaaaaatagtctgcaaagagaacttaggaaatgcttccattaactttttcatcctagctgggtaatactgcttttaattactctgctctgagagcagccatttcttatacttggtattacacataggacatcaaacagaattggcttgaattgagcctttagggaacttccaaaggtaaagattgagtaaagattcaaatgtttattaggatataccagtgttcatttttttcccactaatattccattcaaggcaggagactaggctgatatcccatgtatctagagtggatcaagtccaatatttctttcagagttcctgttccttaaaactgtaaatgggttttatattttattccatgtttggcttaataagaaaatatttttaattgctacctggtaaaattaacatttcagaaagatctgatatgttatcctgtggctcctgcctcatacttatctaggaagttccagcacgctccttccagatgagtccggtacgctgtagtagcatccatatagaggcatgtatatggtagaggtgaaaagctggaacttgtacctgtttgaccctaaggctctggttctaatctttgggcatatctgtcttttggcttggtgtaacatctgctgcttgggacagccattgtgttagttaacatgtcagtttcatcacgaaaaaggcattacatttcagtgaaactgaaaaattattgctatatccagctgaagggaagggactgtcaaatatctcctctgttgtccaaacatggcacagtagatatagtgacagtccctttatcttctactcacccttgcgtatatatttgtgaggtgagagccatatattctcacttcctgatcttgccaaaccaggtccttccagagaatgcttgaaggtagatgggtcattttctcattcctccctctacgtgagcaaccccagaagaacactaagacctgtgttgatgacattggatgtctcacttggctctgaaattaagctgatgaaattataggatcggatattttattttattttttttcaagacagagtcttgctctgtcgcccaggctggaatgcagtggcacaacctcggctcactgcatcctccacctcccgggttcaagcagttctcctgcctcagcctccaaagtagctgggatggcaggcgcacgccacctcgcccagctaattcttatatttttagtagagatggggtttcaccatgttggccaggccggtctcgaactcctgacctcatgatctgccgaccttggcctttcaaagtgttgggattacaggcgtgagccaccacacccagtcaggatcagatattttaaagaagcatcttaacagtccttcatgccttataagttaaaattcctctcacaggaacgtaagcagagaaatcttattttctgagacaggcttcttccctctcgctgaactctaaatactgtattcccctttcactcaaaggccccagacgatgccattctcattataacataacttatggaaagctcagatctattgttggaaaaaatgcaaagtgtgtgtgttcatgcacacacgtgtttgagaaaagcctttccatttctgaaatcccaagagtcatttttatgcaagattatctgttaggaaaaaacccacttttttggtcatggtacattataatcatttctagaaaggagagcgtctaatttttgccatttttggcatgcagagatgactgacttcatagaaaccacactatcctgcttccaaaagaaaaaaaaaaaacctactgaatttacatctgaatcaacatctcttcaaagtccagtccttgcatctcaaccagcaggtccttgtgcaaagaaaatgaatgggaagtgtgatttggggttattccatttactttctgatttggggttattccatttaaaaatgaaataatgttgccattatacatctgtagtcccttctgtgttcagtgaatttgtttttaaaactctaacgtgacacctaatattacatacataagataagacatttgagatttttggtttgaacttcaagaaaaaataaaacggtgtctatttctttttgagaaaaaatttgtattttgtgcattagagaaggttgaagagccatttgttatttgtggaactcctctgtaaaggcattggatttacttatttttagattttcatgactatcccatgcctcatgtttttcccttacagaatcatccacctttgcccaagataaaattgaaatctttaacaagaggacccaggtttgagttcagctcccctgctcccagagagctttagactgtaagataattctgagatacacacaggacatttggactagcagggacttaaagactcactgttgtattacagattatggctcggaagcactgagggaaggaaagataggtgtgggtgttataattcacccgtggttttcttgccctgatgtatttatctggtactcttttgccagtctccttctcaaagacattttcttgctaaatttcttactaacttgtcaaatggagggaaaataagattgaattagtaaaacattcttatcacaatatactctaaaagaggctgggcgcggtggctcacgcctgtaatcccaacactttgggaggctggggcgggtagatcatttgagctcacaagctcgagaccagcctgggcaacatagtgaaaccctgtctctataaaaatatacaaaaattacccgggtatggtggcacgcgcctgtggtcccagctactccagaggttgaggcaagaaaatcgcttgagcccaggaggtcaaggctgcagtgagctgagattgcaccactgcactccagcctgggtgatgggagtgaaaccctgtctcaaagaaaaaaaaaaaaacaaaaaacttttgttatattgggcttatataattcaaattaataatgttacttatctatatccttagtggatttactttaatacattgaggaaaccgctttctgattagcagagagaatttgtacatatgggttcttttagaacagagggtctcaaaatacggtctagggaccccctgcggaaccccagatccataacctaaaacctatttgtatatattcatgtacttatatatgaatttatagatataacaatttttataatagtattctctaatgagtatacagtggagttttccagaagctacacaatgtatgatattgtaacagattgactgtagaagcagataggtgaatacagctgttttccagttagcaagacttaagagatttacaaaaatgtgcaggtgccactctcctcaccttctgtgactctgcatacatgccaccagccaacaaacgtacctggttaatttttttgacaagctgctctagttgaaaatacagtgattgataatccatcatcttgctgataagtagcacatatcggcaatgatgggctaattcggactaaaccgtaggagccgctgtaatgcaatgcttccctttggcttcctgccaacagttgtcagccctcctggtttgctcctgacttttactgggtttctagaagtaacaattggaaatattttatcacatatcagaaagacctcttacaataatttacctaatttagttcttcaccttaacctaccatcccaataaattttaatttcggcagggtagtaagtgtagagcagattacttcaaagtgcagaatcttgtccaaaggctgcttggttgtgtttgcactgccctgactcttgcaggtactcgagaaggtgtatctgtttcagaattcacttgccaaaacctcaactttctcccctagcaaagttgctggagtaggataaacccacagtatttggataagctcctttgaactccttgtagaaagcagtttttatgaggcagttgttctgtgttaacaccagagacaattcctagcagatttccccaaacatacttcaaacatcgataatggcaggggtgacccaaactgtatcataaaatcccagggactgcaggagacttcaaaggggagacagagcaaaacctcacttctcgttatgaggagtatgggtcacaggaatcctggctagaatccatggtaacctcgcggagtaatgccaggatggacagaggccagggctcatcagttccctagactttactaattgaccccagcagcacagttagagtggtaataactggcacctgcccacctcctgaggtgttagaggccaaattaccacatgtgaagtgcttttctatcctttagtgagaagatgcaaaccttgaagtgtgtttctatttttgtttgaactatcgagggcccagttaattcagttgagccaattctgaccttgggatattcagatccatcacttagtatgtacaggcaaattgacagtagaaatttattgagtcttgaactcctactatatttcaggcatttaataagtattaaatactgggaatatttaaataattgaggacaaactgctctgaagaatcaccaagctgtttggtttgtgtgttaatattcttaagccactcttacgtgttcattaaagcaagtttccctatagttttcttgaagaactcattttttagtgatttgacttactctttattcttgaaaacaacaaaattgcatttgtgcatatggtatgtgttgaggggggtaattacaggcattttttccctcattaccgggtccgttacagctccttgaaaacaaatagttatagttttactaattgtttataaaattagctaatgatcctttgattttttagtttttttataccttagctgtatttaataaatatttagtatcttctgtgcaattaataagaacaatgggggccaggcatggtggctcaagcctgtaatcccaggactttgggaggctgaagtgggcagatcacctgaggccagagttcaagactagcctggccaacatgatgaaatcctgtctccactaaaaatacagaaatcagctgggcatagtggcacacgcctgtagtcccagctactcaggaggctgagacatgagaatcgcttgaacctaggaggcagaggttgcagtgagccgaaatcatgccactgcactccagcctgggtgacagagtaagactctgtctcaaaaaaagaagaagaacagtgtttaaaaacctgttatttttacctgaattattttgctacgacaaatttatctttcaaattagattttatcaaagtagatatgtattcacttttttaagttgaagtctttctaaatgtctaaaaccaaaacacagtaatctcctgccctacctttccctgattcctgctccctcagaggcaatcactttcaacactttgggctgtttcttcaatgtggaggtatttacctttatatttcataaataaaccaactgctatttcttgacatcatttgacttcatgttgttatacatacatgtttcctttccccatttttcagtacagttatatgatcctttttgaataacttagtattccatttttacgttattatgactgtgtaaatagtattcccagtgaagccccccacccaggtcactttgatgatgtttcctttttaaatgttgtgctttgtttttttctccttggagttagtaactgctctttcagtattgtctgctttgttttctatatgcacattcgtaatttattctcaaatgcttatttagtttccacatttttttaaccctgggcctagtaactcgtttttctttaaaaaagaaaaaaaaaattttatgttcctattgctaatttatccacaaacactcttctgtatgtgtacaaatgcactgagtaatttattggtttctaattaaattctccctcttgatgtcctctgctcccatctgactggttgttgtctagctatttttgtctctaagctatttttctatagtagtactatagcagtactattctgagtttctttcttccatttatttgttttggtctttttctttcatgaatagagacagtccccagagaatctggtgattcttgactatctgttctactcctctttaaagatgaggcactaaaaagccaattgggagctcttggtttgaggctgagggggccttactgtggaatgatcaagtggggacctgctgactctgggctcctgttgagaggagcaaaactgaatggggatgagagaggggacctgaagctctaactgcttcccatgcagccttttaaccaatcttcctgttttcacctcactccaggcctatctgtttctcctttatgctccaggccttcagagctacttgctgcctccatctttctgaaatgcagtggaggccaccatcctaattagctttctgctttgtggcttccactccctcaaggcttacatttcagcgccacgtgtccatctgcttttcagcttctaaaatattgttgacaccttctctttatccttttggatttgtgccatttgtatccctttgctttccctttagaggggtctctggactagatctgtcatgtttaatcagaagtcctataatttagacttttcactaatttgtgtttcctttcttggtgttctttcccctttacccccaactagtggctctgaattagtgtggttttatgaaacccatatccattcagccatggttctatgtattatctcatttaggcatcacagcagcttttgcacagcatctgctcaggcagtctgtggctcttctttccccgaaagattgagaatacatctggtgagaagccgttgccagtcccagcccctgctttgagtctggtattggtctttaatctctcattctgtgtgttgtaaagaaacaggttgtggaaggctcttgtcagatcccaggaacatgaaagaaatagcacaccctacggtagtgacatggccctgtcaccacccctcattgaaccataaaagctattcagaggggccagcagctggggagcgactgtacttagatcctgggtgctgatgggtgttttgtagtttccaagggaagttgctgaaagttttcttatcttgacactccaagggcaagaggtctttcttcaaagagaagcgcttgtttcagaaaaagatgtggaaaggacgtaaaatcacaggttcttccccagttctgaaaaagaaataggaaggggcaacgtggcagtcagtgtgaaaagaaaccacgcatttgcaggaagcaagaaggggttccgcagcactggctgcttccggcatctgcagtgcgagggtaaacaggcctactggggagtcggttggccctgggtttgagtcattgggctgctgcttggctgtgacctggaacaagtttttcccctcttaatctctctgagatgagattcctttgagtcatatgcctacctcggtgggtggttacgtggattaaattatatcatgtatataaagcactcagcctggcatgtggcatgcaggtagggctcaagaaatggtgtcagtgtgaatattctcccctgaatgttggaatgttgtgtgaaggtgaaacagggattgtgtccctagctcttacttaaattcaaccctgtccccgaattcttgctgaccacctgctagagtgtgaggactaggagttcatgtgcttggctgggcttttgtccttcccattctctttcttcacacaaaatgaacagttgaactcaggccaccaaacctggttgagttgctgggtggagggactctcctgggctctgagcctttgtgtgtgggaaccgcactggaaaaggtgtgcagaggccacgaacttgctctgaacccacttgtgaagagcaggtgaccccaaactattgttagtgtctgctgtaaatgatatgcctctgggttcgagcagagttcagccaaaagccccacatgacatggaaatctgtcctggagccaggtttgtcgggtaaaagttatgtagcaaatgtctccaaacattggcatctgttgtctgccgagactaggacaaccgagaatgatggagtgcttaaggaaattaggatggggcatgcgaccctgtaacagctgataaactgtttcaggccaccgtggctcatccagctcttttgataaacagctttaaaagcattacgtggtttggaaagcattcttcaaaaatggttatattttccagacgcatgacagtccactgttcagtattatttaagggttttaaattgtagaatcagattccttttcagtggggctcttggaactgtcgagggctgatctgtctgactcccaccaggacaatctcacaacaatattattatgtaggtcggggtcccctaggtctgttaaaaaaaaaaaagttcagggctaagcgtttaagaggaaaaactatttctttcatttctagctaagtctgatgggccctttcaaacactgctttcatcatgcaccttttatttcacgatttctgcataatgaaaatacaagatcgataactgtggattatcgtaatgccttgagcctttgaaaatgaacattttctagattataaatgttccctttgtaattcatttcaaacttcatcctcccatttgtcctaattcccgaaatttaactgttgccttttgagcctcctaggaaattctgggtatcctttaggcaagggaggtagctcttgggggaatagcattcaggccacaggcaattcatttgcgacttgggctcttcttagaacatatgataagtacaacgcactgtagtgacagattttttaaaaaccctattaaagcccaatatactaatgcagattttttttttttaagttttagagagattcatgggattttattctttttcccaaaggcagtggtggagctgacagagtagcatggagcctcgtcctgatgtattgtgcggaagtggcagcagttcacattcattcagtttgtcagcataggatcagttccttcttgactcaactctctgtgatcaaaataagctattggatgttccctttgggtactggaagcagcttggccccttggcaagagaacaggattgcaaatcacaagagcagagccctgactccagctctgatgctactgtgctttgtgaccttgtgcagacagctttatatccccatctcaggtcattctcccccatacaaagggggagagggtcatccttgccctggtcatgtctgcatggctgaggtgaataactagttgtgtaacttcctggaggagtggcacagaggaagctcccttcctagggctggctctgccatcagggaggaagctggatattagaatgaagaaaaagcccatgcagaatatatggcagcccgataatggattctaaaaataaaaaagcactaggttaatctgcagctgtagtgtacctaaagtattctttggcaggttgtggccctagcctaatccccagctggacttagcaccatttaagtgagttacatctcatccccgcaagggattgagtctgtagccaatttggccttgtcaccacttcagccctccctctgatttcacctttgggaaaactacaaagtggccccagacatacatagcaggcttgatcacatgggtggagtctgtcaggacagcatacatcaaataaaatgtccagggaacctgttgtaaataaaccacttcccgcatgctcagtcatcgtggaggtacttgaatgtttagtttcttttagctgatggccaagaaatcaatgtttaaaaaaaaaaaaacaaaaaacaaaaaaacaccttgacagaggcattttgtacaagaatggtgtgtgggtgtgaaaaagtaaattccaaaacatatttccttttagttcccaaacccatattagatgagtacttcttagccttggccacagtgctagagtaaatagcagtgtcacatagctcgtggaacaggcaaaccacagaatgtacaagagagaagcgtgcacaccagtgagtctgctatggcagctctctttgtcctggtttctacatctcatttgtaagcaacttgtgttcctgcattttcagagtttggccagtttatttacttagaattgcatgttcctggaatattgtcataaaagtgatcctgagatagaaaaagtcaacaggaagcaggggcattgagtttataagttctcagtctgtcttggcccatattaaagtctcattctcaggggtaggtccagctttccaaattttaatatatcagagactcctgatgcatctgggctcatgatgggccaaagtaggccttcaggagtcctcgtgttacacactcaacgcctaatggagactggattcatttacgtgtattaatgtaacctgcgtgatcatgtgagtgcaagtgctttgtagattgtcctgggagatgtggcatattatgactaaagacttaattgaaccctgaacatgtatatgaataactggagacagattgactggattacacatttttcttgaaaatttcctaaatttagcctacctctttgttgccttttatttcccagcttaagtggttctctataacactatattttaaacaaaccagaacaaatagtatacaaaagcatagacaagagggatataacaagagatggttttctgtgatccgtggcacctcctctctaccctgcctccaccaccaaaaggggctttaaattaagattcggaatggcaaattcacttaccagctccaaacacagtagacaaggaaaccttgtgaggaaaatccgagagtatatttacagtttctgttcagaaatacatagcttaacttcgaaggaggaagcgtgacttttcacctgcagatagaactagggtctgatttgaaacagaccactggcttcactgaaccccatcaaagaagtctgcttctgcccggaattggaaagtgccagtgggcatgtagttgctagtatgggatttctgtttttatttttaacaagcttgggcccaactcttagtatcaagatgggtgaagacaaaactgaccagaaaaacacgtatcaagtcagcagtggctcacccctcagaggccatttttcccacctgctcctcttatacctttggtttgtttttggttttggattttttctctatgttcctcctactctttctttctctattttgcttgggccttcgttagaagagttctagtaatcatttcagacttccaaaattcaacccagtagcctcattttacaggtggacccactaatacacaacagctcgatgtgacaaaccatagactcacagttaatcacttggagagcctggattcacctccgcgatgacctgcctttccagccctccagtggcgtcctctgtagtgagttgtaaatgtgccactctagaacattccaggaaagccctcctcttgggctaaactctaaaactaaaatgaagtcctgcccatgtgagctgcttgtttaacactttggatgctaatcagagcattaatgagaacacatggatagattcggcaggtctaatgcttgggaccttctcctatttgattccataagactaaatcccctataaacacttccctcctgtgcacacacacatgcattcacatacagcactcacgtatccctcccttatagccaaagaccgaaaaataaattttttttttctacattaaaaataagaccagctagtaaccagggttggcattcccatctcctgtggaacctggaaggactagcagatagctatagagatctgtctcctttttagtgtggttgtattaagggcaatcttgcctcccatggcaccccagaaaatccaggagttcaagtgggggtgcactgtaggaggactcagcagctgttttatggaaggttcgtcagggatcagactgaagattttgcttttgtgagaacaaagtgaaatgtgacattcaggagcagctcggggcctatatataggggcccagggcctgctgggatggggttttacacttgggctgtccttttgcccttcccctgaactcttttcacttcagtcatgagcaaacagtcagtgcctgaactaacaaccctgtagtcctccgaagcacggctggcttacagtaccgaacaaagggagggagtgccgcgtgggccggcccaggccgaggaatgcggcttcagggttctgctccataaatttaaccagcacgacgaaaaggagataatatgagccttcgtgatgatctgaaagggggaggttctgtgtcccattgattgcggtctggcccaatgccaggcccaagcctgaccgacagttgaaccatatcattaaggcgtgtaatacagctcgagtcttgtactgccgccaatgagtgcatatccacagggcaaaagtttataaagagtcgaggctgtcctgtttaaccctctcacactgcatgtaatagaaccagctgccattcagaacttgcccatctgaggtcataaaggaaagcctgcacgtttcttttcttcaaacagcttttcaggactggggagaggaagaaacgctgtctagagagggtcaaggcacggtgatgtttctctctggagaagcaaagcagtctgcctccctccccccggccagaaacgggacaccttagtgctttcttcagagtagctctctgtttgtggtataatgttgctggaggaaacagggctgacaccacaggaaacctgcctgtctccaaggaggccgcatcggtggcagaggtgggtcagatgccggccgtggagtgctcttgtcaagcttgggatgatgccgttttccttccccatcacctcgaaagctgttaatagccttgctttctggccttccacagctacgcccaggtgctaaaacagagcaggtggaaggccgccccacggagtggcctgtgagcccagagttctcactgtccgaggccggtggccccatgggaactctgtccattcaatagggagggcatgtagaaataggcacattgtcacagcaaggcctggagtggcctgggttcttacagtgggcactgcattgaggaaatgggcagacaaacaaggatttagcataagtatagtcagaaagaaagggctgcctgtgttcaaaggacaaaaggaagaaagtgggcgaaggggtagtttagtcctgtccatcagccagtcacgttctttggccaaactcgggacctgcctgtgctttgtccatggtgtccaggaagaaatctgtgtctgtcacttccagattgctgcttgtctgcaatggacaatgcctcttaggcagacacctgctcgggatgacagtgctgcagaaattgatccaaaacattgactagcttgcatggtatcgctgtcattagtattcagtcttcacaaccaccctatgaggtgggtgctatactttccccattgtacagatgggaaagttgaggcacacaggggatacgtaacttgtctaagatctcagaggtagtaaggaagggtaccagaatgtggaccctggccaactgaacacagagtacatgctcctaatctctgtgctgcttctgggccatctctcggtccctcacatcgaaagacctcatgatttcaatccaaagcatctgaccaagtgttaggtctacttcctttcgattcttggatatgaagggtaggagcttaatatctgcctatagcccagaagatttgtgcaaagaccctggttcacttggagaggaggtactataaaatttggaccccacaatgcgaatgaagggtatgtattgaattccctcagcccaccagcttaacacagagacagtgtgagggatatactatagctgggaagcttggaagggctcatgttcaagggcctctttgggccaaacagcagtgggcctgagcatggagagaccctggccttttagtgccagtgcctagagaagcaggtcactaagctttgtgcccaggagctgtgctgtccctggtccatccctgtgtaccccattccactcctgaaataatgaactactgcagccttccaagttcacagtgtgccagtttgtcacagaatagcagtgacacttctctgctgcaacccatctttgctctgccatgctgccaagaccatcttcaccaggcggtaacctgggaactccagctggtacacagtacaagaagcctccgcagtagactgtcccaggtgcatgtgctcagtatgtcatagccatctccttttggaggccagggagagcttctgtttgggtgccacggatcctggacagaagctttctagaggtaggagaagagactaaatggctggccaacccagagattgttggattgtgttatgattccatggtcaaagtgctttaaaaacctagaaattggctctggtagtgagtcccaggatggagctaacttacgatctggactccattacatgattgctaatcctgaagttcagcaaacgttggtactggctgacttttaatggagtacctgtttgagggttctcctcatcatgtatttaaggttaaattgtataaaggaattctgctgctcttttgaaattttctggttctgtttaaccatacctaaaaatgccatgaggtagccagatgattgactaactgggatttatggaaattcttatctgcaaaaatctcaagacaaagagggcactaactagaaggttcccagtgctttatgtaacatgcagaaggaagtctggtctcagcttcttggatctgagcaatcctttggaaagggagcaatgaagagcagtaactgaagactcatttcctgccttctgtgtgactcactctcctttgtcaacttcaagtttgccctaggcctgcttgcttctctccaccccaaggaacttggtctttggaagacacaggcacctgccctctctgtctgccttttgcccccaggtccagagggagaaacaaaccctcagttggaggaaagtctagagcacaggctttgtgttgctcagagaagcatgacaggaagtggtgctgttgcctctgcattggccgactcctggctgcacctgcttttcccagaggcacggggaggcccaggcaggggcccagggcctgctgctgatcagtttgtcctgcttgcaagtctgcatcccagtacccaacggggccaagtagaaaaggcacatagtgtagtgtgagccgtagctgtcaccagatgggtctttcccctccgtgcccaaccccttccctgacctgaaagggcctagcctctttccccactggcttccaccaagttctaacacattttatatatatcgatttccaggcttgtagaggcaagacctacagtccaggagttcaaatggattcagtgttgttggttcttgtttcctagaaggacaagtgctctgaaggtttggtgtcaactctgacccaaggggtgtatctgatttttatgaaggcacagaaatgcacctgaggtgaccccaagtccttctcttttattttttgatttcccaccacctggatcattaattctgctttcaagggggatggggaaaggagaacatttcaaagcaaagttgatttggtctctgaaccagcttgtcttctaggctgtagttcaccctgatgagaatcagaaaggacagtctgtaaaccccttcactctagtgactctgcagctggggagcctcaaaaccagttccagatgttctctctccctatattggccagaagggaatttcgggcaagcaaggaggcagagagcttttgcccattcattgagtacccctgtctgcaaactgtgtcttgcttcatggcactttagggagagtgctgagcacctgggtccatttgggaccagccagcccttcctgttcctcggttagaggcatgctgctccaagctggctggttactgcaagcaagagaagcccgccttcctgctgttcagggtcagaaagcaagaccgtgctggagaagtaagtcaggcaggctaggaaggagacctgcagatgacccttgggttaacaaagcaactttcacggccctgttcaccaccagctaggatagtacagggctttgcctcccaatcttgggagacgaggcatagatagtaatggtcaactgatggccctttactcttgagaaactccacccagcctccccttatccagaagaaagccattcctgactaagcctggccattctgacgccttctttcttagtctgcacccagcctgtgctgtatgcggtatatgatggtagaaatttgcactcttcatgctttgattttaaatgcatattagacattttggcatttgtgcctgaatgctctctgtatcatcttttttaaaacatagtttgattatgtaagttaaagaatgtacaaatgtaaacttctgaaaatacatacaatatatgatttcttagagtgtatggacactgctccagaggccttgcatgaattatctctttaatccttacaaaacgaatgtgatgggtactattattcccacttcaaagaagaaaataaaaaggacttattctccctgggcattgacaagcaaagagattaataatggtaaccccaccagacatctctatgggtatatatgtgtatatacactagtatacatatatgtatacatagtatacatatatgtatacatagtatacatatatatatactagtatatatatatgatttgacatgaatgggagtacatatgttgatgtctaatctttttcactccacaatggtgctagaacgtctttccattccaaaaatcatttttaacatttacataatattataatacaaatattccataagctacttaactagttccccattgatggatgtttttaatttgttgctgttgtaagcatcctctacatatatcccatcttacttgaataattctctccttaggctaaagtcctaaaactatgattgctggatttaagggtgtgtatattttctgctttgaaacacattgtgaattgccttctagggagttgaaacaatttgtactcccacccacagtgtgtgagaggactgactcctccagccgtgtaccagctctggctattcattcattcagaattcagtcaagaattacatgaagtagctgcagtgtgccagatactgtactcagaaccaggcattgttactcttttaagtctttgccaatctgaaagagtgagtatctgtgttactacttgcatttctttgagaattagaagcgttgaaacatcttttcgtgtttcagttggccatttggatttttcttcttttgtgaattacattgcgtattctttgcttcaatctttttaaacccgttaaggtcagaatttgtctttttagtgtgtggtttttttttaattcttatctagtgttggtctaacccttccaacagttgtcatttagccagtttgtcatccatgtaagtacatatctttcttccagatattaacaaagtttatatcagtctcttggtgaattccgttcctgtaagttagaatctgcatcatgactttataaaagaccatcactgtgcctacagttctttaggaatcgctttggcattaagaatgaggcttcagccaggcacggtggctcacgcctgtaatcccagcactttgggaggccgaggtgggcggatcacgaggtcaggagttcgagaccagcctgaccaacatggtgaaaccccgtctctactaaaaatacaaaaattacctgggtgtggtggcgcacccctgtaatcccagctactcaggaggctgaggcaggagaatcacttgaacccgggatgtggaggttgcagtgagccgagatggtgccactgcactccagctgggcaacagagtgggactccctctcaaaaaaaaaaaaataaaaataagaatgaggcttcagccagatgtttttggattatatgtggcgtggcctattacatggtttttatttttgtttcctcctatttcttagtatttctttccaccagttcctgttgtaaaacgtgaccagttggtactgatgctgtacatccttgtattagtaaaaatcctgctgtgcctggaggcagggacctgcttgggccaggccttcccaggaagcccgtcctaccctctgtagcatatagtgccggaccaccccagcgctcccacttacctccttcactctttcattgttgatacatgggctaggtttcctacagagtcacttcaaggatgtagatcttatcctcccaattggattgtgagtttgttgttattgccttttttggtattcctcaaggatgttcagaatacctcacatagtgatggactcagagtacctattaaagagattttcattaaaatcacaccattcagtaagttgaccaagtacatcaagagagtcagaaagacccaagatctagtttggctttgccaggcatagcttcctcatccataaaatgaaatactagtaagatacttccttatgtgaatcttgggaggctcggagtgtccagtacacattcagcactcagtcagtgcagctgtagagacatagcgtggaccttggtggcccagcagtctcaatcctggtttcttctgacctaagattggtgggaaagtacagataaaagctggttgaggaggtgttgatagcacagagtgtttttacggagtgtcctcggagggttacatgctcctttttgttgaatccgaatctttttttttttctaatatggagcctcataatcattcaaggactcagtgtgatgccacaggtttcaaacttgccagttcgtctcttatgttctgccaattttttaaaagtgggaatatgagtgcatgtgcacgtgtacacacacgtgtgtgtgtgtgtgtctttgtgtatgtaaaatgcttgggataaaaaaagatggatcaaattttgtctggcatggcatagcaactctcacctctagtatcctctaaacatttaaccaaatggactttaactggtttacttcaattctatttttattttcgtagtcatttaaatgtatggggagccaactctttcaaatgagacattttgtcattaaaacatgttatttagtttaaccgcatgggcccggcttcagcaacattgaggactgtgaagagggttctgagcggctgttctctcctgacctgaccgcagcagtgacccaccagcttgcaatgcacgcaaactgaaacaggcaggatggccagcccagggttgtctgcacggtggtcttggcatctgtaccttaggttgccagctcctggccctccttgcctgcatttggtggcccttggccctgccgtgtcatatggcacaagagcccttctggcccgcatcaccctgtgtactgattaggcaggaatcagcaaatccgttgagtgcatgtttaatgtgacacagatgtgggacatactacagatctttctgctttacaaattttcagctttttgcatttcatcagtgttgcttattatttacagaatgtaacttgagacatcagaacagattgtaatttttaaaaaggttgttgggggggtgggcccgcaggggatctgggagaaaaaatccagtagtgtggaatgttgtttgctgtccagaccaaacaaaccagtttgccaagggttgatggactatgacaatcagtccaattcatgttaacactgggggcacttaattaaaaggcagcttgacctccttatcaccaaataaagaataatcttttgttaccaggttgaccgtcgcagcaccaggcagaaatgtaccccttgtagaggcactgaagggtaccaccaagctgccagctcgtgtcctgcctccttcctgtccacagagaaaggcaccattgaacccagtccccactcagacatgtggatattcttgcctcatgcctgctgtggctttacacccaggcgctatggcaagaggcggaaaaaagaaatctcttcctttgcccaaaaatccaagatactcttgagggcattggaatgatgagccaggccagtttgacacaagttcaaggagaaggtaccatctcttgcttctagaggggcacatctggctagaggtggccctggcttctgagaaagctcagccataggttacatttaagggcaaacaatgaaaagcaccagctggtcgggaggaagatgaggaggagtgggtgattggttgcttctttcctgtgtctagttctaaagaacttaaaacttgggtccaaaataatgagagccgtgttgtaaaaatcatttgaagagagttctcctggggaatgtgagctagtgccgtgacctgatcccttggtcagatggttctgagctgtttaagtgctgagtgtcaactgtctacagggagccaggcccctgaggagcggccagggttccaagccccactgttcttttccttcctggaaaagtgcagacggtgcacgttccccggaggccaccaggcagctctccagttgccctctgggtgaacgtgacccaggtcggtaactttctagtgtcccccccacgttggaatgatcagcattcctgtactccaggggttcttgagttcttgagttgttaccaacgccctgcctttctctggctcagattcagaggaggagttccactgcggactgccgcttcttcaccctctgggcttcggaagcagcacctctggctcccctgcacccagtcctcagtcttgtggccctggtctgcccctttatcacatgtcttgagcaccctctcagcacacagcaccgttctgagcgctgaggtgcgaccatgcatagaagagacaagaatccctggttccgcatggcttccctcaacacctacgtttccaggccatggcttgggttcagaagaatcaccctccctggaagagatgagtgactggaaggagagcatgtcactggctcccctgagaccctcccaagagcctcagtttctccctctaccacctgaagtctaactgcagggcctgaaacagattctctttaaaaacccatgagtgtggtgactgcataggttttcattctcctgagttcttaatttccgtgtccctagcactttttgaagcatctgctcctgttgcccctttcttttcctcctcaccctcctccatagtctctgtttgatagtagaaggagatttaaaacctccaggctgagtgaacaggcggtcttgaaaaagcaaacaaatcgggtcaggcacggtggctcacgcctgtaatccccagcactttgggaggccgaggtgggcggatcacaaggtcaggagttcgagaccagcctggccaatatggtgaaaccccgtctctactaaaaatacaaaaaaattagccgggcatggtgccgtatacctgtaatcccagctacttgggaggctgaggcaggagaattgcttgaacccaggaggtggaggttgcagtgagccgagatcacaccactacactgcagcctgggcgacagagcgagattccatctcaaaaaaaaaaaaaaagcaaacaaatcacaaagcaggtcccctctgggggctggagcatcctcatatctgcttggctttggtcactgaaagaggccctgggggagggggcttcagggcttcccaggggagaggtgacagttaggacacacgcctcccccacttcagtcaaggcagcttcattgtcagcggttgtacgtactaagattgtgttacaaacttcatttgcagaaagtgttttacccctgaaatttttttttgaaagcgcctgctgtgagttttattaatggcacttttctaaaacttcattaatttcaattatgagaatttgatatctggtgtaattcattgagctgctagtttgatttgctctagctcgttttaaaaagctctgtcaggcaacaggatatggatgggagtgggtcaggtgagtgaaaacgttttaagcactcctttcttcagaaaacacctctgtacccacatggggtgtgctcctcaggagtcattcagacaggtccaggagaacttgtcccccagggtgctccgtccagatacaattttaaatactgcactttcgcattttggtattttcaatggacttgacacccaataattctgaataaaggtaggaaagagggagatgattaacttttacaagtacctactatgtgccaggcactatgctacacattcttcatattttatctcaacattatcaaccaagtaggtattaagttctcacctattgatgaggaatctgaggctaagaacaatctagtaacttcttcagtgtcacccagctaataagtgactgggatttcagcctgtgtttgtctttttccagtctatgtttgttcctttatactactttgttcttaaatttcatctcttctcttaaaagaggtcaactttgggagaaggtagataatatataaacattgaaagaaaaagattatataatcatttgccagaaataaatctgaaaatattgggctggacacggtggcccacacctgcaatcccagcactttcagaggctaaggcaggaaaatcatttgaaccaaaaaaaaaaaaaaaaaaaaaagtagtgaaaatgtatggtttattaatgtaatcagcttgttattattagcatgcgtacttaatagccacaaaataaagcttaccagagatggtgtatttcggtccttgtgaaatatcttgggattggcattagaggtgacaggttagcaaggaatttgataatggcttgagagattccaataagcactacactctctgactcagaatgttctacttagaacacaaagaaagcttacaattgtaaagcgccttgttcttccatgatgttgaaagttgcaaaccactttataggttgtctactattttgtaaaagcaaagcaaacccagaatgcatgcaaaaattatggcctttaaagaaatccaagccttttaggctccattcttactataacatgatctattttcttggaattctttataaagtaactctgcccctccccacccagccattaacaggtagtctcgcccctgaggcagttgactaagaaaaaaaatctggagtatttttgtcttagagtttaaatcccaataggtgtatctgttggcattagtcctaccagctgtcacagttgcagtgtcatggggtccccaaaacatgtgttaaattatgggaagccttgacccctataaacaagtcaggtgtgaatcccactgatgggagaaaacccagcccaggaaatgtcatccctgctgctggatgtcaaattgctaaaaacttaacaatatcaatataatttctaatgatttcttgaatcaacatctttcttacattttcaatggcaatagtacaacatgggattttatgtgtgttatgcatgtatgacttgagaactctagggagaggtaagtagaatgttaacaagaaagcaaaggggaaaggaaaatacttcagtttgaagcagtgagcctccccagtaggaaaactaagtacaagaggttggatgttacaccctagcccatcttagatcccagacacctcaactagggttcctcgtgtgcacccatggcactctaaataatacactaataaaaagaataggtagcattttatcgagtgcctattatgtgctagactctgttctaagcactgtacatgtattgacttatctactcctcacaacaacccatcattacccccactttatagatgagaaaaccatcgctccaagaagtcacataatttgcctgtggttacagttcgtaagtggtggagctgggattcaaacccactgggcaggctggctccagagccgatcctctcagccattatattatgctgcctactctagtgctccctgtctctcctactgcttccctgctgtgttcttgttgccatttctgttcatctcctccactgaattgctgtaagctccctggatacttaattcatcccagtcttcttcaggacctagtgctggcctctgcatatgatagtttgggaaaggttggttgaataggggactggaggaggcaggcacaaaccatttgcagggctctaagtaggctcgtttttctggctaccctagtttggatccttagtcagtaattccatttaagaaccaatctctactagcatagggtttctttctgcccaacctattttccatgtgtccaaaatccaaattgtcccaacctacggattgaatactatctttgagtgggttctagaaggtgtatttctctttctcttgaaaccttggggaagaatttctcatgtaaacagaggcaaactttagaaattttcatcctctaatagagtcttctctgattacagtttgcactgaaaggagtaaaatctgtttatggagaagaaatgcttttccacttcgtctttagaagtagatgcatgtggccaagaggagggagctacacgtcagaggtagttgcagcctatggcatgatgggagctacaggtccgagatagatgcagcccacagcatggtgggagctacagatctgagatagatgcagcccatggcatggtgggagctacaggtctgagatagatgcagcccacggcctggtgggagctacaggtccaagatagatgaagcccacggcatggtgggagctacaggtccgagatagatgcagcccacggcatggtgggagctacaggtccaagacagatgcagcccatggcatggtgggagctacaggtccaagacagatgcagcccacggcatggtgggcttcttgggcttgcagacattgtactgctgtggataccagagggtttttcaccaattcgtctactctactgcagacagtactatttagacagactgcggggtttctcttagagaaatgacaaatgtttgattaggccatttggtcaagaaccctggtatcttgtagctgttatcagtgaccagtattggaagaggtagtctggattgaccttcgttctcagtctaattgtgcacactcgagcacagtatatatcagtaagatacttgattaaaacaaaagccctggacacatacataaagtgaatgcaagcacaacccatcacacaacccttaaggaagatggcagccatcagttgaataaacattctatgatgctaacgtcacatgtgtgacatacactttctactcacttactgattgtttttgaacatcacttggctgatagacattggccatgacagacttctcaaccaaattaagctgtgtaggggtatgtgtatgtgtgcacagcatctgtcttaactaacagacctatgacatagttactcatcgtataagctacgaataattaatgcctggctaaatgttgactttcaggctgaaaggcaagatcaaccaagtggaattggctggatctccctgtgtcaccttgtttggatttactgttgattttttttttaaaagacatgagttgttactactctgatcattggttttgggcctccggtgtatatcagatagcaatggccagatgcaggcacactctgtattgattgccctcactggaaggatatctgcagtgtatcagccactgtatccacagccccttccctgggggaagagtcctccatgctgtacagcagactccctgacattttcatagagttcaaagctcaagttggtttggtgctgacattctggattagctggttgactggaaggactgcttctttctatacactgtgaaatttgtaaaccgcagcagctgagggcttaacatggccgacaagctccagctggcagcaattaaatataccgcagacctttggccaaacaaaggtttgtggaggcagagttgctgcatgtgcgctgaacagactcctaggttgagtgttggttcataagagatgctgtcgactaaggagaggtgagtgggtggattttggccacctcttgttcggtgatccattgtccccagaattattgtatcaagaccctgcccaagtagcagcaaaggtggtcagaggaaaggaacaaagccaccagggaggccgcaggcctaacagtggtgggcctgagtcgtttagacgttgatctgctgctgtagcaccaatggcaggatctgcagctactccacttttttaaatttattaatttatgtatttattgggtaccactatgctgtaggctataggctgaaaggagaagatgggaatgaaaaaacaataagaagacatttaatatccattcaagcagcaaagattcaagagtctagaccagtgctatccaaaatacaatttaaatttaaaattcagtcctttagttacactggccacatttcacatgctcagtagccacacgtggtcagtagctatgtattggacagtgctgtcctagacaataccaagtgttggatatagatcgctagggccccttaaatgcctcattggcaggaatgtaaaaatggttcagccacttcgaacgcagtttggattatcttgttaagtgaacgtttatatcttgtgagccagcaaattccccctagatagattctcaaagttcaccaggaaacacgtacaggaatgttcataatagcatcatttgtaatagcagaacctggaagaaacccatgtgccatcaacaggaagatggatatatcatgggatagtcatacaatggaatatgaacaaagcagagacatggtgaattaatcatggctacacacaaaagaatacctgaatcttagcaatgtgacagcgacatcctttttcaaaagcccaaaactaaacccaaagaacataacaagaatgtactggagcatcctttgaaatgtggtaaggctacataaaaaagaaaagcacaggaatgagaaacacaagattcagaacagcggctgccttagttaaaggaggaacagggatttggggtggcagaagaccaacttgtggtccacgattgagtgatggagtttttttttttttgctttcacagatgtttatttcaaataaataaagagagcccaatgatgagagtgggccttgaactgaggataataagcccagtcctaaagaccagttattaaaaaaaaaaaaaaaaaaggactggccgggtgcggtggctcacgcctgtaatgccagcactttgggaggccgaggcgggtggatcacgaggtcaggagaccatcgtggctaacacggtgaaaccccgtctctaataaaaatataaaaaaattagctgggcatggtggcgggcgcctctaatcccagctactcgggaggctgaggcaggagaatggcatgaacctgggaggcagagcttgcagtgagccaagattgcaccattgcactccagcctgggtgacagagcgagactccatctcaaaaaaaaaaaaaaaaaaagactagagtcctttccctccaggtgctcataggcttactggaacatacaggaaagtcacttaaaaatggacacactgtcactgagcatgaacaaatgtaggactgctgttacatggtcatactcgtttaaaaggcctacttgaacgtacagtgtcacatcaacagatgaagaaaacagcgtcgtcacacagtggcctgggctgaagaacttcactttaaactttttgctggcttacgaggtttgaaaacactagcttactgttagctttttacattattttagtaattctttaagattggaactaaatttgttcatatgcagtgacttcaaatactctccccctacccacagcctaccaacttggacctgagaaggtaaatttttagttgagttttagagaagaaagaagagtttttcaggcactgacattgatgaggtgatacaggagtggggggaaaattcctttaatccagctttctgcttctaggaagagtatgccttctggaagtccttgtattcataagactgtaacagaagatgtttccttttagggtaaaattgaactcatctgtcttttcttccatgttgatgtgaaaaattagccttgaatgccacagtgagctcccctagtcagcagtgttgagcactgaatccaaccttgcccttgatattatttgatcaaaagtcaagaaccctggaaatgggaagatagtttgtggcctgttgtgaagacagtcaagaaaagaaacataatgatagtcagtgtgtatcctcaggggagccactctgcttttgtattctctgatgttttggtgggtttgcagtttacaggttaaaaaataatgtattgggagtgggggtgaggttggatcactgaaacctgggtaaggctctgagggagtccactgagtcaggaaataactgtttacactagaaagctgtttgatcgtgtgagaagatcaacaaggtgagccctttactcccattctcaactattctggagctgtcatgagattaaatttttaagagctcgggtccagaaacaagccatctttcgttggcttctctggcttcctcggatccaccagaggcatttaggacttcagcaagttttctcctgcctggtagcatgttttccctcagctttgagtactaatgaaaatcctgcttcatgtaagggaaaggcctgtcatcagtgtccgcttcaggacactgccgtcatgtccctttctgtgttttgatcagtggggcagacagagacagccttgtcctttctgtcaggaagatggggttctagctgcttcatattttgcctcaatgttgattttgctttcagggctcaaaatccttagtcttcaaactctccaccaaagcttgcatactggccttcctgtttagctcaattaatggcccttataccgtctgccagccaccaggcactcactcgtttattcggcttatcctgactgctgctctaccataaaccagacactgttctccatcccaggaatgcagtgaatgaaacaaattccccctctcctggagcttccagtccacatgggagccaagcagtaaataacatgtttatccacctgggatggaaagcaaatgtgctttgagcagatgactgacttgatgtaacttaccttttttttttttttttttgagacagagtcttgctctgtcgcccaggctggagtgcagtggcaggatctcggctcactgcaagctccgcctcccaggttcatgccattctcctgcctcagcctcctgaatagctgggactacaggcgcccgccactcccccgcccaccccagctaattttttgtatttttagtagtatttttagtttcaccgtgttagccaggatgatcttgatctcctgaccctgtgatccatccgcctcggcctcccaaagtgctgggattacaggcgtgagccactgcgcccggccgatgtaacatcttttgaaagggccattctcattgccatgaggagagtggacaaggatggaaggaaagagaacaaattatgagactactgtaataatatattacaaatccagggatcctttgttagttatgatcgagatggagaaatagtcagatttgggatatatattgaatttgagcctgcaggcctcccagttgattggggaagatatgttgagacgagtctgaatcaaaccttacgttgaaagtgatgaggaagcagaccctgccatattcctcttggagagcctttgggcttctaccatgtagcctgacagagaggtcagcaggactgccctggggaaaggatactttattagcctgtgtaggcagttattggaatgacagcaagtgctttgctaggcaaggagataagaacagagctctgctacgtggagaggcacgccaagctccttcccccaaccccgctgcctgcagaggttaccagcatcctctcggcagcagtcgtccagcttctctcctgatgggttagcagcggcccctctaccgccctccccactttcgatcgatatttgggctctgagtagccaactgtaagcctgcgtcttgaaggaaaaattgagactggcggggtatgtgagtgtgtgatataaacacaatgggttttttactctttcccttagtgcagatcattgaaacttctataaagtctctgtaatacccttagagagtacaattaatagtactgaagacgtccttataactgaacttttgtaaaattattgctggatttttgtctttccagcacacattaaacctcaccaaggtatggggctgtccttcagatgtcacagcctgatgaactgagtgctgacctggctttgggagcacttttcagttatcccagctgtgcatggcccattgcatggcctgtgacaattttctggggttgtttctgtccatatttccaacctgacttgcccaccagggcactttctgcccttgtaagtaaatctctatgctgcttactgttagttcctgtttctgaagtgctgattcgatgtgtaaggcttctcctctcttttagatctgtctagagaggagtgttttgcttcagtgagctccaggaacaaataataagtacagcaagtacaaggccgaggacagacccagtgcactcttatcagtcatctgaaatatgcacagcctttccaagacaaatgtgcactcctgtttctaggaaaacaccagaaagtacttaccaattaccctgtatatgctgtgtggaaaaagacaacatcagcctaccctgaaagccataacaaagcagattcctccgggccgccgacagctgagtggcccgagttagagcctctgcagaatcccagcctgtggcctgggccaggtccaggtccaggtccaggtccaggtccaggtccaggtccagggggcattcttcccctcgcatgattaccacgtccctcaccctttgcccaaggaactgacctcatcttagaagaagtctcaagggttggtgtgttcttactaagtgcccaggattttcttccagacccatcacaaatccaaagatggctctcctgaagagaggcctaaaaaagagggtgcggcccagggggatctattatagtaataaccgcaggaacgagagccgccgctggtgggcagctcaccatccgccaggagcaggcttggcgggcactgttttatttggtcttcacagcagtcctctaaggtaggtgtcatcgtcctgtttcagagagaaaacggaaactgagggttaaggaaggtaaccaacttatccatgatcacatggccagaaaatggtagaggcaggattcaaagtcaaatgagggtctttaaccgctatttcatggtgtattcacaggcagtactgtaggttaattctgttcactaaatgtaaagtatgtctcgtattacagagtgcttttgtcttagtgagaaaggaaaatcattttaacctgcacacttaacctcttggctttatgtccatttacccatctaggactcaagcacagagggttcggaaaccgcgttgctgcacggggccccaggggctgcttccccgatattctgagagccaggcggaaggacaggagcagctcttcaaactcacagacaacatacaggacgaattgtaagttagagcatgggaaaccagccctgtgggtctactgagttgcctcttcttttgatcctgagaagtctccatctgatctgagttattttcatgactcttggaccttagatctggtcaaagaattccttgccccaaatgttttttagatttagatataactgatgctaaacagccttttactcaaagcagtggttctcaactgtgtgccatagcctggccttagtgttttgtttctagaaaatgacagtctctttctagttagttcaaagagagaagatcatgaataaaatgttctcaattttaaggtttttctcctgtaaaaatttcttaaagtttgatatcccatttttgccgcagaatgctagcaaaacaaaacagaaaaacaaatagcaaacaactaatagttggacattttggaaatgtatttttcgtaagattgcttcgttactctttaaatatggagccttatataccttgtcatatcttcagttagtgatattattcctagttgacacggtagagttaagtatttcactattttaggatattttgcagagatccttgtagcatgaaagtgctctataacctgaataggtgttagaaccaccagcccacagaaagcagttagttgtgtctgggagtagcaaaatactagattaatttcttctgatgcttatttgccatctcctttaaggtaaagcgagcgtgggggattctgagtgctgtgggtgtttttcggtgggtggaggaatgtctgaaatagacgtcaactgtcaggatagtcttcagagtcattgttagggacagtgttaagtagatctcatctcatagtttcatggtagtatttgaatggggatatcaaaagccaactccagaaggtatttgttgcttgccggatagaatggcatcttcctacatgtgccttgtgtgacccctgtggtgttattagaaggtctcttgaagatggagttgtactttcttgtttcgtctacttgggttgccattataaaatatgataggctgggcagcttaagcaacagaaatttgtcttctcacagttctaaaggctgagaggtccaggatcaaggcatcttctgattctgctgctgctgggggttctcttcctggcttgcagatagccctcttctcactgtgtccccacattgcagagagagagggggagctctctggtgtctcttataagggtactaatcctatcagctcagggccccaaccttatgacttaatttaactgtaattactttcttactccaaatggtcacattggggttagggcttccacatatgaattggcggggagggggtaactctgtccacagcaggtgttgctaataggttctgccgtttcagtccagtgcccagagtgcccatcagttcactccagaactgctccagttcattccttggggcagggatttggtaccatgactgctcttgatattgctttgtagatggaacttttagcctttggatggggggtctagagaccccccatccaaatttctcaggtctggcaggatgtggtgcagagtctactacaatggcagccctgtgaggctgggatttttgcctgttccattcaggaaagaatcctcagcacatagaacagtgcctggcatctaataggtacccagtacatatagccagatagctgcagttcagcatttgtgttcacatgcgtccattttccattcatttgggggttttttagtcacaggctaaatgagattataaattattgcatgttttcttttcactttcctccccaactcacctctattcaagtcgaactatctctggtcactgtgaaatttgtttgcaatagaagaaattgcgtggtacagccaacataggactgctcccagtgagatacacacattgaaaaacagagccagagagagctaaaaactggaatcgaaatgaaatcagtaaaatagctttcatgaaactcatgaaattcatatgaactaggaagagatattggcatgaatgaattttgactttaaagatgaaaaccatgtgtctccacccaagttgtgggttaaatcttgccaatgaatgctgaaggaggcacgtgaccacggccttcccaagtgtacaaggaagaagccatcagggagtgtgtcgcatgttcctctgaagtgtcctcagttgtcagcctgggtcttcgcggtggagtgaacattacactcatcactctgcaagaaaggagttttcaggaaaagcccacgagcgccaaattatacctctgacttttatcctagatttgtaattaaaaacatgtttaaagacctaattatttgcgtatttcccttcagagttaacccctttaaaggatctttaataccttgctctactgttctgactaaatgtttccacatttttttccagttaggctcactgtttcacttctggaaaatattgtgtaattatttcccgatggagtgaaaaccccacgaagtccccagtgccttggtgacttcaactttattctcccagatcgagttgcatttaattttgtcattctatttaattaattaatattaaaaagatagttaccaacgtatgatttctggtctggccagctgaaaagtcttcactttcaaattaatcatatattcctctgataagttgcacaattgtcattgcttcccatctttctcagttttggttttgaaacaggatctggattaagatgatgttaaagtaaaatttgtcctatatggtgaaattaatttttctttctaactcatgtctcatttgtagccagaaactcattttcttttttttaaggtacctattttatttctaatactgcatcacctataacggtgcacaccaggctggtgagcagtagggtggctcctgccttttaaaaaatgctcatgagcaacccacatgacctacgaagctgctctaatgtactgctttctggaattaagacaatttaaattgtacttttaaaatatagttttagaaagtaacatttatgggattttttaaatacagaaaagtataaaaaataaaagtaccctatgcatccaccagccagataagttgttcctcttttcaattttttgtagagatgaggtctcgccatgttgcccaggctggtccgaactcctggcctcaagtcatcctcccacctcagcctcccaaagagctatgaggccaaagtgggaggatcgcttgaggccgggagttcaagaccagcctgagcaacatggcaaaaccccatccatacaaaagttagccgggcatggtggcacacacctctatccccagctacttgggaagctgaggtgggaggatggtttgagcctgggaggtcaaggctgcagtgagctgagatcacgccactgcactccagcctgggtgacagagtgagaccctgtctcaaaaagatactcatatgcatggttagcaaatccaagagtatagaagaaaataaaatcaagagtaaaagtctcttttcttatctactttgtaaacatgctgtttacgatttttgtatcttgtctccttgagaaatttcacagagagagagcaatcaggaaaatttttgagcgcaccatataatattgattctaatagcatatcattataaatacaaaccttatagtaacatatgtagtctcaaggactatatatgtttcattccttctgaggaatggaatagaatttattagcttccatttcctaaaccaggaaataatgtactagtaactgttgacacttacagaattggccatttgttgatacacctctgaattaaaacttggatttggcagatggctcagctactctgataaagttaaaggtttgctaaatctttaaaagctaaatcaggagttctaagagaagttttcaactttcctactggtaacatgtgtccagcatccaaagttgcctgtgcactggcaaatttcttgccttaccctaatgccagtgtcattttctgagacagactaacgcatacatttattgaatcctactatgtgccagggtgagtaagaaatttcctctgtcctcagtgcgttcacagtttagcaggggaagcagacactgtattaccaacaacctataacatatattgctgttaaaatagaagtatgagcaacgtattatggaaccacagatgggaagtgattaatttatactggaaagccagggaaggcttcacagagaaggcgctggatgagtcgcctgaccttgcaggaggcggaggaatgtgccaaggagagaaggcgcctgggcagagcacagtgctgggcagatacacgggacagaagagctcacggcaggtctggggaatttggggtcagctttttgtagcagcagcacgtgtggaaagaaggagcagaggctggaagggtgggttcccaggcctgttgctgaaggctgaccttagtggtcatgccgaggagcttgcctctcctgtaggtgggagtgagattgtgaggaagaggatcccactcaaaattcgtcatgaaaaataaaaccttgacagcagcaggtagagagactgaaggcaggaagccagttaggaggcccgtgggatagtccaggtagaaggtggagaggcctgaacacagtggccgtaacgatgactagaagaggacagattggagaggcatttaggaggcagcatcagtggaaccctcaactgctaaattggaatctgagtgaggaggagggttgagagtggcttcgggctccttgcctgtctggttgatgaggctgggggtgctgaagagcaagggttggagaaggagcatctccccagtggacgagctgaggtcccctgaagagggcctggcactcagagcgacactgggcccagacatggagtcagggccataggtggacctggggtgggtaacgcctaggggtagaggagcctgttccaggagctctgagtcaggcttctgattttgaaatgactccagagggagtagaatcaggtatataaatgagttaatatcgaaaaaaaaaaaaaagagcaggaggaaaattaagtagagtggctgaaacagttacttggcagatttctccctgagagaagctggtcatgagtctgttttccatgtggccttctagagagacatctctctccaatctgctgatgagaggatgtgtggggaaaggaggggtcatcccccacaggtttggggtaactgggcacctgttctcaacagaagagctaccattaactgcggatctcttctgtgtggggcacgtagattagctcacaccatcacagtggccctgcagagtagacccatggggttctacacatcaggatggggaagctctgggcaaagtgagaggcggagacgactggcatcagggtggctggctcccctggcgaggctgcagtgtggcttgggaggacgttgtgacctgccccagaggaggcctgaggctgctgttgatgctaccatggctgctgttgttgagaatgccccgtggttcatggtttatggatgacattagtgatggtgcattctactaaggcggcactggctcctggcagattcacccactcttagcacctgtcatcttggaaaagggtgtaagctggtgctgcagccttcccttctctcagaagaaactttctgacactgagccccaagcccagagtatcctctttctctccttaaaggggagttaaaacttttttctttcttcttcttctttttttttttaatagagatggggtctcactatgtggcccaggatggtctcaaactcctgggctccagcgatcctcccacctcagcttcccaaagtgctgggattataggtgggagccaccatgctctgccctaagagttgaaacttttaaccgaggtttaagaatagtataaaaatcctattttttaaatagaatcaattatagtatctacagcaacctaaaatgtgtcaactgaatactgaggtgacttctctaggtctcagattggaaggataaagcttatctgatgctgtgtgtttctggctgcatttttttgctcccctttcctctcagttaatagcagatcagagaacagaaggagtttgctcagggccacctgagaccacggtggccttcttcccttgaggtttttccaacagtcactcattcgtggaccaaaagcaggccttgcgggaagcttgattctaagggcagtgaagacaggagagcctggggttgagactacaaagcagtgtgagcactcaaggaacctcaagtgaggcaaaggaaagcctgggagaactaggccagggaaggggaattacctgtggctttagggaaagggaacggaagaaggtgcagcttggcagaggggagggcggggagcgtgccgcgtttgccaggcttctcttaccaccctgagttttgctgcttctctcacagagtgacaagtttgatatgaggctccattagataaggggtctggtctggagctgtttaattattctttgatgtgtttggcagattttgtaaaaaaaagaaaaagaaaaaattaaaattaataataataacgatgatgatgcaacccaaagccctggccattgtgggatgcaggaaagcctcaggaggatgatggggacagagctgtggccacctggtccctggggtcactgcccagttccagctgtggcctcactctctcccttctccttcttcagccagacccttggctctgatctgcttttgatttgaaaggactttagaacatttcatgcacaatttccagaaatatgttattatcagtagcagcttcggggcatgcacagggtcctggacttacaggacagagatccgtgtggagtgacagcactgccttcctccacttacctttctgtatgaccatgaattccttgacctccgtgctcactttgtgaagaaaactggcagggattaccctctccatcagagagatgaaagagtctgagctaccaagaaagcaacggactcggccagagtcagccagcgggccgggctttcctgccagctcggcctgtgtttccttcgctgtgctctctacttttccggagggcgtcccagctcagagtcacccctcctccagaagtggttctggcctgatggaggacttgaaccatctggggcatcttggaaaagagtctgtttgaaagcctatagaagtgttccaggatggaaagcacactagtcatgtcggccactctggcctgggtgtgagagcatctgcccggatgggaagcccttggctgacatgtaaatgtcagctatgtcaagtgcccagggtggtggcgctgggggctgggggctgggggctgggcaatgaggtggaagtgcctgtgctgtgctcacctagaggaaggaacctcacatctcagttggatttttcatgcacattcctgctgtcatcccaatcatggtggccaactttggagtctccttggagagcctgtgacggcctcagtggctgtgcaccaggcccaccgatgctcaggggtgtaggctgcttccgggtctcatctcagatccccgccagttctggctggcgctgtgtcacctcttctctgtgtcaggatcatttttatccctctctgtctgtctttctgtctttccctgtgccctcctttcttccccggaccagctatttcagattccattcaactctgttcagtgatgctgccgctctcaatgcggttagagcgcaagatgtgagaacgtctgtgctgagtggcctaaacactgaaggctgcgggtctttctaatttcagcattgagactttacaagtccacattcttggcattgccaaccagttagaatagaacaataaatcccagtttttgtcatgggcgtctgtaattaaaatggcaactggaacaaggcagtcacttactgagcgctgatggggtggccaactctgtggggtgctcaggaagacacggggctgtgagatatggactccacttagagggctcacctcgtagtcagcaaagagacttatccaggacatgtggaaagaatgagtttgtgcttggccatgctttgggggccatcacaattaaatgctcaaaagtggaggaggggctggagtatgtgggggatgcttcacagagaagttagaacctgtgatccttgcggggagggggatgggatctagagaagttgggagagcaggtgtgcgtcctgcacggaccccaagtgagcgagggcccggcagcctgctcccctcgacaggcaggccacctcctgcccccaggcttctgcccccttcagaggacctgggaacaacgccgttctggacccaggtttcagaacacttccaggtggagcctggctctgagcaattcagtttgccagcaggagctcgactgccactccgtcgtcagcctttagtattcctgccactgtccatccttgtctgctgtccctggacactgcagccccattgtgaagggctgtcacaagatgcaggggaggcagccaggcccgggagaactgtcacactgttcccaaggttcactgctcttcattcagtggccagagaggtttgatgtgcataaatttccactttgaatgtgtgagctccatgatagaggaattcagttttgttggagtggccctaaagctcctgaagtaacaactagaagtttccaaaaggaagatgacagttttacctaagaaagcgttttctgactctttgagttttctgaacatgaagtggatgggggggtgccctgtccctggaggtgctgagcttagagagggaggaagcggatggggaggtgcaggtgttttaacgccaggctgtctcttcatggcgtgccatttggtgaacctgtttaattctgcttttcccccctcagctttcagcgcccccagctgcgtcttctcgccccttcatgtttccctctcctctgccaggcagtgaactttctcagctgctccttcagtttcacattgaaaggcatcgtgttttctgttttgtccaatagagtattgttacagttttctgtaagctttaagctatccaaaaatgctcacagaaaaacaacaaacacccacaagatagaatttcaggatttagaagtatttcccggcaagggggccgggattcgcactcaggccctggggccacagagcccgcagtgggcctccccctgatgctgggcgaagccccaggtgtcactcctgtgttcccgtctcgctttgcagcttcatcgctgtggagaacattgacagctactgcgtgctcatctcctccaaagctgtttacttcctgaaaagtggagactacgtggatcgagaagccattttcctagaagtcaaatacgatgacctctaccactgccttgtctccaaagaccatgggaaggtgtatgtgcaggtgaccaagaaagccgtgagcacgagcagtggagtgtccatccccggcccctcccaccagaagcccatggtgagtgcctggctgttctcaggctcctgaggggcggggccagggcctcgatgcctctgccctgcttccccgtcctcagcaggaactcatttaggaggttgaggctgggcccttcccaggagtgctgcctctcagtcctgaacatgggaggggcccagggtatgttcacggggcgatgctgccctcccagctggcccatgggtgaccctgggaacattaactgcctcacaacgtttgtgcctcagttacccgtagatgtagtgagggtaacaatacttactctcgttggtgataaggaacagctaacacaacacacagggtttttctgctcccaaaatgggattcttcagtgcaccaaatcgaagaaagcactggagctcacgctggtttctccattgtttctccttaacagtggaaaccgtaacttttgttctagtagcatctagcatgctcaataattatttgtaaataaaagttatactttccctccaaaggggacaaggtattgttatgacaaggcttttaaataataaagctcctgcgaatagctaacgttcctagagggctggctgtcttgtgggttgtctgatcactgtgttgctgtcatcccctcctcactattggtcatagcaggtgattcattcaaggctacacagctgaccttgaggagccggggttcaaatccgagtggcttggcaccagagctggctgcagagcctcttgcggatctgtctctggccagtcggccctggaggcttgccatgacacccaggtgttagtcctgctcattctcacccggcatacccggattttgaagcttgcattcaagaatgatacattaatcaaaagggcctgcccacctctgctctctctatggatcggaaatagcgccagccttattgggcctctctcctccggagtcctttggcctccccctgctcatgaatgcatttgggcctgtttggacttgtgtaaggctcccgtggggtcattggcttaagttagagctggctgatgaagagggcgagcacctcaaagtgtgagtatttctccagatcccttcactgtagcaggtgggcagcctcgcccactatacttctgcccctttcaaagcaggtgggcagagaggtgtttgtggtaagaaagacctagaggcttttgttcgctgattcttcttccttcatcagccatcaccagaccttagatgtgaatcccccattcttgctcttggtcttacctctgcagatcagttatggccgtgggggggagttcccaaatgtcaggtgagtatgggttggctgtacagtcctggggaatgtttaaaaagaccggctgggcgcagtggctcatgcctgtaatcccagcactttgggaggccgaggcgggcggatcacgaggtcaggagttcgagaccatcctggctaacacggtgaaaccccatctctacttaaaaaaaaaaaaaaaaaaaaaaatcgttagctgtgcacatgcctgtagtcccagctactcgggaggctgaggcaggagaatcgcttgaacccgggaggcggaggttgcagtgaaccaagattgcgcctaggcgacagagactccgtctcaaaaaaaaaaaaaaaattgcagggacccaccccagacttgtgagtgcgagtgaagcaggagcagccctggccatcactgtttctttgacgtgtacatcccatcctgagatgcagctgggctgggagccgccacctgggtggatctgattcctggatttccccatcctggggacaggtgacccatcctgttctcctccttaggtccatgtgaaatctgaggtccttgctgtcaagttgtcacaagaaataaactacgcaaagagcctctactatgaacagcagcttatgttaagactcagcgaaaaccgagagcagctggagctggactcctgaagccccgctgctgagatgggcgctcccgacacagcgcagacccaccaggaggaaagaggcccagctctcagctgacgatggaggcagaaccggagtcgggtttggggaagttgtcaaggaatgagggaaagtaaatcctcatgaggaaaagtacaaatggaaatcgtattaatttgtgaggcagggagttattttagattatgggaaataatttttaaaggtattggttaaataacgtttaaaaacatgtactgagatgaatctaatttttagattgccctgtattttgttaacatgtatatatgtacaacagtgtgtttgtaaatatataggaacgtttctgaacagggtctgtgctatgtgtaaaggtttgttaactgtaaagtaatataaagttatattggatcttctattgcactaattctagatgtctaattcaggatactgtctatagaaaggcattcttaaaagttaaagaatgttacgtcttagttttggagactaaagtattcccagtaaagtgggttgaggtgagggctgtggtcctgaaagggacgcctttgacatcgtggctgtccagttgggctgtgagctgtggcacccaggactggcgctggcccttcagaaggatctaggagaggggcttgggagcccacttttaatttctcacccccattttacaaagagtgcttagattcttacaaattatgatgtaagttatccatttggctttttcctaactagtcttaccaaacttagggggaaacctgtgctccattaccacatgggtgcaagtcagcattgtaagttttctcaggttattattattagagaggttggaaacattggtaaactctgttgattgagaaggaaaaaaaaagtcccattgaactgttgcaacaaatcagaaatccacataaaagtgctctcctgcctgggcagcaacaaccaagaacaaagccccgggactgttttctttttaataaagccacaggcaggcatcgtagctccacagcccgaggggacacaggatggaaaccccaggatgagaagggagcagggagagttccagaaagggggatgaaataggagtattaaaaagctgcgttggtaagtttttcatggaaccaagatttgacaaaggcatctcttatccttggttttaaattcctgctgggagcaaggcctggtatgagcgccctgggtcttgtttttggtgtttcgcttttctgtaaggattaagcagatagggagaagggaaaaggggcctcactttagaatgaatgagtcaccttgtgatttttaaatttttattttaataaagctaatcaatttctacaaccttgtcacatgtagctgagtctgggatgactcagtggatcagtggatgcgtggaaggttttggtgtttataactcatgacccaaatccttccaagacacaaatgaagctaatcttcttcccctccctttcctctcccacttcccctctgtgtctgtgtctgtgtgtgtgtgtgtgtgtgtgtgtgtgcgcgcgcgcgcgtgcatgcagagaggaaggaagggagctttagcacaagtagctacatagtgttcaaggatcagctttcttgaactccgaggcttggttgcctttgctgaactccaagttagtggattgcagaatggaaacttggcttttgcggcactgggtgagttttagtttgtgtgtgtcttgctggggggtggtgatgattgtctcagcactcacgcactgcacaagatggcagcaggatacagcactgcacaagatggcagctcctctgcagcttcctcctcagcctccctccttgcacccccacaggtttggcttgtggtttttgtcatcagtaacctactgcctgagatcatgatctcttaaaagatgagactctcggaagggttgattgtatgcgtcagtgagccttctatcaccttctggaacaaagtcacttgaaatctcttgatgagattaaggagtttagtgttactaagaaaatctgctttgggccgcagcagtgctgggtgttctcagacctgactgaggaagttagctgcgggctgccctgtgggctggtgcttcaggaggaatccagagaagtgttcagatgccccccttgggctcctttctaattttaatcagctctttaaatagctgcccatctcctgtgattgcacaaccaagcactttgacatttgcaccttaggagaggcagatgttaaaatggaatccaaagaccacctagggcggggctgggtgggagatgggagggccaactgcgagctgctccacttctcagctctcccctgccctgcagccctgggccagacaaggccagaaggtttcaggggcatttgacatcccctcctggttctcaccaggaaaacatccaaagctttggaggaaacaggccctgcccctggctccttaaatgccccgtctctttgtaaactgatattcagccagcaatgcctaagactttgttaagatcatttctactgcttttctttctgcttcaaacacacagttcgtctctgaggaaagtaaaataaatggaataagagtaaattgggtaaggagatatccaaagctacccagtcccttgacccagcacagttggccgacccgtgtcactccctggctgtcgctgcttctctgtgctcactgaagggtgagccaggccagtgcttccccagcccctgggcctggtcactacacagtggaaaacagacaagcggccccttccccaaatcccaagagtgtcttgctgcttggtgggtgctcatcgcaatgttctgaaggctccagggccactttgtttgtaagtatgatctgggcctcaaaataccatagtagctgcttgataaaattctaaaaatatctggttctctattatgtaaacactattacagtcaccagtgtgtgaagactcttgagtctggttctcatatcagagtcatcatttttcttcctgtggaataaaatgccttgtggacttcccaaacttgttcttttgttttcttctggtctcttggtgatccacagcttctagagctatcaccagtgacaaataccaaacatagtgtgatgttcacaataaaatgtggcctctgcccccaggcctggggaagcacccccacaccttaaccagtctcagcctcccaagagtaagtagtagtctccgcgctacactggctgctgatcagtccattctgaggttcctggtccaagccccagcaggacagacgtcacacttagggtttaggcagctgaagaagaaacagcaaaggaggccgggcatggtgactcatgcctgtaatcccagcactttgggaggctgaggcaggcggatcacaaggtcaggagattgagaccatcctggctaacatgatgaaacctcatctctaaccccgactatatcgcccctctctattccatccactccacctcaaaattaataaccttgtgtgtcgcccaaattttcaccacgttatataattatgtgtataactaaaactacaaaaaattagctgggcatggtggtgggcgcctgtagtcccagctacttgggaggctgaggcaggagaatcacttgaacccgggaggcggaggttgcagtgagccgagatcacaccgctgcactccagcctggcacaacagcctggcaactctgtctcaacaacaacaacaacaacaacaaaacagcaaaggaggctcagcaggatcatccagagatggagtgacaccaggagggtatggatcctagaagctgaggccagaaaggtttcaaagactaccgagggctgctactaagtcaggtgggattcggaccaacaattatcagtggacctagcaatgctgaagtcactagagacctttctaagagctgtttcaatggagcattggaggtgaaagccgggttggagtagattcaagaggaaaatggaaggagagaaataacaacagctctctacaggaatctggccataaatggagagaactgaccggaaattcaagagggcagggaaggaataagggagaagagggcctggcgggccaggaagatgggtggaggtgggggagcttgagattccattgattgctcctgatttctcacatcaggcaagaatgaatacagggcgggaagtgatgctgatttggagagagagaaggtgcacgtagtcatgtagggtaacgggaaagggaataggccacagaagcatggtatgtttgccgggcgacattaaggacccatttgacgttgatgaccgtgaatgtacagtggaatcgggcagcctggctgtattcttgtccggccacatgtagctgcacagcttcagtgttgtagaacaggcaaagaactggctttaatcaagaaatgttcccctcacctattcaagtacctcatccaccattgcccagttgaactggccaagagccaatcagaacaaaatgtcaacagaaatccaaaagcctagagaagggaggggctacgctttccaa

SEQ ID NO: 666 - DNA, 255269 bp, Homo sapiens
  source 1..255269: mol_type = genomic DNA
gtaaacaagccacgaggtacttaaaattaccttaaaccagttttattttgtcaaatagtctgttactacagctatagataattttgttctaagtgtagcttaaaactaaaatgtgccctggataagataaaaagtagtgtctgggcgtcctcattacaatcttccttcctaccactagtctatgctgttgcactaagtactgaatgcttgttcagtgtccataggaatgtggggaagatcacttttgtctaagatttgttactcagatgggaaaaagtcaaatgccttattttttccccaaaatagaagcaggcaatttataaacaattctgttcacgaaaaaatgtattctgaattcataaatttaagttatatgttttaactatgtcaattagaaaaggaaaatattatgggggtggggcctccctttctaattttgaaaagaaggaatctaatcgtcatagttaagcactcttacttacaatgttgagtttttgttaatttctcctggtcctctgcctcactttgatctgcatttaatgagttacaaatcctgtgaattttacctcagcgctgttttttccacctagcccattttctcccctttgtattaacacagtttaaaacctcaatgtctataaactgcacagtgcaggcaaacatgtattgaggtcttatctgtgtgatgtcttatgctaagggcttcacatatgtacactgtttaaatcttacacaaatatgatgaaataaattctaaaagttttcctgttttacagatgagaaaagccatggaggactttttttattattatttttatttttttgagacagagtcttgctgtgtcacccaggctggagtgcagtggcgcgatctcggctcactgcaacctccacctcccaggttcaagcgattatcctgcctcagcctcccaagtagctgggactacaggtgcccaccaccacgtgcggctaatttttttttgtatttttagtagagacgggatttcactatgttgaccaggctggtcttgaactcctgacctcgtgatcctcccgcctctgcctcccaaagtgctgggattataggcgtgagccactgcacccagctgaggacttttagaactaagtaattcacccaaggtgatagtcagtagtggtggaaccagcatgcaaattagacaatgtgacttcatagcctagtattctactctacttctgtaacttatggctggaagggactttaaaattccatctactccatgtttaatgcttcattctcccttaacatttgcaaagttgtcactagcctatgttggaacatctccaatgactgtcacaatagtcttctatctctcaactccaactcaccctatgctctgccagattcattgttttcaaaaagctttttgtcataatctccctcagctcaaataaacaactagcatttccaaacagagcaactacaaccacttcaaacatcctaaactccctccaaccctggctattcacacgcttcagttcacaacttccatccagaatcctacttctctgattgtcctcatggggaaagtatgctatttccttcatcctacaagatgcttctcactgactctatccatattcttctcatccttcaagagccaagtcaaatctctctgcttccaataagccttccttgctacactcaggtaaatgtaatctctccatctcctggcgaatgtctcgatttctttttctgtgctatgcctggtgtgacagggagtcagggccaaagatgatctaacaaagtcagaacatgataatccaagtacagaagatcatttcatcaatacaggctctaagaaacagtctagcagtgggtgactgctagactgtttatgagaatatgagaatgaaggccaaaaggattcacaagaggggatcaagagattttcaaggaacttctggaaggcaaatctaaggaagaatccaaaatcagaaaccaaaaagcatagtcaggagttaaagaacttagaggagcagagcacaaagttgtacatcgtatgtggttttatcttgggttgattcttctagttttcattaggatgaccacacatcacgtatgatttaaagatgttgctttgcctcttacaatttgcacagcttttgccacccattattttctatgatatattataattatacatctgacaaaattctgaaattggcagctgtgactacttatgctctggacttatctataaatcttttaaggatagtcacaattttgtctgtgtctctctaagaatcttgcagtgttttaacataaaacatgatgaagaagtatttgatgagtgtatgcatgcatatatagatggatgaaaacattaaaaaaaaaacttgagctccatcatttctgaatgtataaccaatcctccaaaatgtctgaagttaaatgactggctcttaataaacctttttgaggcatccacactaccatattttactaattactaagtgttttctaaactgtgtgtgacaggtttttagttaattgaaccaaatatttgaccagatttgaagaatagtttttcaaagtagtttttaatgaggccatatcttgaagtttgttacctgttaaattaaaatgaagaccaggcctgaagaatccctgagcagctaaaacgagtagacctcattagtgacctaagggttgctgggtttgcaaacagaagtgaaacttaacttggggtgatttcttgtaaatgcctatattagaaagaaaacaaaacttaagctcaaccaatcaaaagtagccaaaaccttagaaaattattaatataattagggacgttccaataggatataccaaataaggcaactgtataactataaccaatcaaatattgtgcttgctttatttctgtgtctgttctgtaaaagcctcccctttgcattccctcagtggagctcatgaactgcttttggtttggagcttcctgattctcaagtgagtgctcaaataagctctctaacattttattatgcctcagtttaccttctaacataactgaactcatttgactttgtataaagtaaaaatatcataaaccttaaaactatcaccagtccaatattttaggaagcattttattagttacaaatataaaccacccacctattattataaactgaaataccaagagtaaactgaagatcatcagggtcatagcatcactatggagattaagtactgcactctttcactatcataagtgatgatttacacttgtaaagaaaaagatccaggagaaatattcagcctgagtgtatgtgtgtgtgtgtgttttttttttagttctcaaaaggagaaaacatataaactgatatagtactggataaaaccacagactactaggtagctcaggatgcaaaaacaaacaaagattaaaattccaaactgaaatatttgagaaataattatcctttggtaaaactcgctgtcaagaagaaattcatttttaatcatgaaatatatttttcctatgctatttttgctttgctttaatttgctatttagcaatgcctgaaatattaataatttgtttaataaattccttctaactcttaatagatttttaatgaagaaatctgtcttagagatctgtcaagaattgatattgcatactttctgaaagcgttaaattattgacctgctgaacagtttcatttgaacctctatccttttcttgccattttctatgttcagatattcttagaagctttgtgaaatgtaaaaattattgatcctataagccataataacaggtattttaggaataagaagaaaaatgtttcatccacatagtcaatttataaaaaataaaatcttttattccagattaaaatggtaaatcacttgtaattagcctgataggtaaaataaacccatactacttaaaaccatgaatgaagatagaggaaaaaaaaaaaaaacattcccatgggggccccatcgttgatctattttctacaaaacacgtagctagctattcctacatggctgcctaaatgccagagctgtaacagctccagataaatccctttctccatgcagattttcaacactgggaaggtcagctctggagttcaacaaagtcaaggtgcattctatcagaatggctgagatgctgactcccctattgtactcttccctggattatgacaataaaacacaacgctcagctttgaaaataagtaaacttgtgaagacaggaaatgtgtgacactttcataccccagtctcttcatgaccccaagagaaattcatacagggtttatctctgtagattctgaagacaaaatggatcatgacaagcctgtaatatttgccatcaatcagatctggatttaatccccggcttctctatttactaaatatttgacttttttatcatttgtttatctgaatgtgtttctttataatgttgccaaccttataggactgagggaaagattaaaggagataaagtatacattttcaaatgtttgttacccaacccaacacataattactgcttaataaaaactggtggctatggtagtggtgatggttgatccctgcccccaacataagttccaaagccaatactacagaaaaggataaaatactgtgaattaatcccttagaaaagctctcactagatgtcatcctcttacacctaaaggactaaccaatgttgagattaaaactcagagatttggttttaagtctgctatggcccaggaacacagagtttgcagactaggcccaaatgcccagttagaaccagtgagcaataaacagtattggggaatgattttaagattgggtcagacagacttgagttctctagggttttttgggtcttttttttttttttaaacatttctcaacggagcaatcatgggaaatctgcttgaattttctacatctcagtttcctcatcggcaaaatatgaaaatcattacatctcattactctcaccagttacttcatggtaatattagcaacatagtttggattaagatcctcagagatattctagattataaacattatgctttttgtgactctgtgtttcagagtttcccaagctatatgtccctagagacttgttctgagagatgctctgacaaaagaaaataagagttaagttccatggttaaatacatttgggaaacactacaccctttttggagagtcacagttaacattggcatattgaaagccttgagaaatcccacaatatagataacacagacagtgctgatgcgttctgatggtcgcagaaaccagctctgaccaacccacacccattgtaaggagttgcttggccccacaaaaggaatctactttgtaactattaagtggacttccacctttgtttttctctcttaaggttgccctgattcattcaaagaggtaagtactggaaagagggaaaatgacatataaaagaactagataaacttgaaggcattagcataattcatgtgcatcaatggagcctggatagtttacagtgataatcacatacatttatggatataattggggattccgtgaacatttaattaccgacaaatggactgaaatctgaaaatcagaccaaaccagactgaaatctgatttccaagaaaaaaatcaggaatgttactgttgtactttttaggacctagcaaaacagcagggcttgtcaattgatacattatgtataagacttaatgctattcactgggaatataatgagttataagagataacctgctctcctagaagagtgcttagcacataataggcctttagtaaatatttgctaaatataggagcacattaaaacacaaatcttactagaccccataaaagggctggatttacaatacaaaatgaaaagaagacaatgcaggtatcttttattaatgcctagtattaactgatataaatgcacagcaaatagtttcaaattttcagctagattctaacttctcagttgtataaagaattatggatgaaattagcaaaagagctagtttaggttttgcatggaaaaatcctgcaattttggtatagatctacaagtgaacaagccatgtgtcttatctaattaattcagacatctgggttcatactttgagtgatgacatggctggtggagtccaagagtgtccaagggacacattactgcatgaaaacactcaaagtttgggttggagttcatcagagggataagcaagtccagctttcaggaagaagttttttttttcatacaaaagactaaaacttgaagatagagtgaagtaattaaccaaaacagggaggagcacaaatataagggagaagagcagctcataagctcagaggcaaaacccagctcagaaacagagaggaaatcagaaaagagctgggaaggacatatttgatgacaccaagaaattttgtataaagagtttcttatggtttagttggatatttgtaatttgactaaagagcaaccgcttttgttacaagactattttctggcagccaaatagcttctggtatgctgggaaattcaaaggaaagaaagaattaactcatacaaattgcttagaacaggaaaggaatgcatttacccttatgggctgttatggactaaatatttgtatcccgagattcatatattaaaacccttacccctaatgtgacggtattagaaggtggggactttgggacatgatggtgaagccctcttgaatggaattagtgctcttattaaaaagatcccagaaagatccctcactctttccaccatgtgaggacacagcaagaagacaagctgtctatgaaccaggaagtgggcctcctcagacactgaatctgctggaacctgcatctgagattctcagccagcaggactgtgaaaaacaaatgcttgttgtttaaaccatacggtctatgatatttttgttatagcagcctgaacagactgaaacatggacattctaagatcatgagaggccagaacacactggatttagagcatgaggcctgggattcaatcttggccctaccaatttatttctagttattttacattacgcaagtcatggaaactcatgagttttaaagacttacctagttggtaataggtattttatagggattacgtaaaggttaaatgactgtctataaaagtgctttttaaattacttcctacataataagtgctaaaaaagtagttttccaaatatttcctcatcaaaagattattagcaattttttttatttgataggaatgggccaatgtatctaaatctcctttttctgttttcaggagaaatttatctgccaactaaattacagaggaataaagttgaataaggagggcagttttgtggcctagctagatatctccctgactttaaattttgctcttatatgtgatattatattgcacccaaatatttctaaaactttagatgcacttttcactgcaactttactatgatcttcattgttttgttcaatatatgtttataataatattaggatattttcacaaattatacatactctttgcatgttttaatactgcagagacatatggaatattaggataccaaattggatttttttcatgccaaactgtagcatttaaaaaaatactgtttctatatcatatttcagtttgaagtactttttaatggggcttaataatatttatatgtaagtatttaataaagccttaattgaataagtcatgttaaaatgtaaccacaataagttattagcttgcctatataaatgccaacaaaaataatgccaatttacttgtctaattcttaagtcaaacacaaaattgcttaatacattaaagagaaaaaacgtcaacttttcaaacaaaaaatttattttatagaatattaatgttttgaaacttcaagaatatctacttctgaaattaggatcctctgtccattagtcaattaaatatatgtgcacaattaaatacatctgtattaatttctaataaacatgaggctctgaggtcagatagccaagatcccaatgtttactatttgtggcacttaaccttactttttttttttttttacttaggttccttatcagaaaaaatggaaattatctcataaaatgactacatgaattgtataaagtgttttagcctaggacatagcacacagtaaaaccttagttaatatcagctctgtaggactaataatataactctatcccgattcatttttttaacctatacaatttaaaaataatttaaactacatcagggcttaggtaaggcctgaaatattacattatacttaattatagatgacgacctctgctatgagtcttttgtaaaggtatttttcacacctagtatcatcctggtgcctcatctccttaggtaaaacttcttcttcatccaaatatccgaaaaggtgttaaacaactcaggtaagacttctcatttaaggtcactctaattacagcagcaacaacagatgtatatacattcactaataaaagaataatttgtggttgtgtccctctgaaagttaagccagaaaattttagattttattgagacataaaaagaaacattgctctccaagtcaaattctctattattaaaatatgtcatcctttatgaatttcataaatagcaaacccaggaacagagtaaccattttaaaaagtctggaggggattccataacaacatttaaatacattactactcaaacaatttgattggattataaaatatttgaagctgcagctgtagttgtgatgtttactgttgattattttgatttcaagatcctcacacaaaaaatacaagtttacagaactatttatattaaataagtgcactgtaaaatgaaatgtacataatatatatttacctaaaaaggacaaaattagaaatagcaaaataaaatcatagttctttaaaagttctatctccgaataggaatagttacctcaaaaccaaaaagactaaatacatgttctagttgaaaatgtattgaaaactaagcaaaagacattaatgtgagttctggttatcataaaactttacaatagtgaactacacatgattctacataaatctaaaaacattttgcaaacatgaaagcatttataacctaacaactataaagtaataattctattattttatttttgaagatcaggcccagaattatataatgagatttgacttcaaagtggcaagttttatcagcatgttctaccatcacatatttaaagaaatcaggtgaatggattaaaaaaataaagatacaataattatatacatatgtgctccctaggatgttaaaataatatggggaaaaatgcagctgaaagatttccactgtacccaactccacttccctaccaaagcagaagatggaacaatgatgactagaaatcttcatgaacaagaggaaattccagtttctaactgaaaccttactataaacagttatctgcgataagctgtatttgtcataaaaggctcaagctgcattgacagatcttacatcaggggtccccaacccgctgggctgcagaccagtaccggtttgtggcctgttaggaaccaggaaacacagcaagaagtgagtggtgggcaagccagcattacagcctgagctccgcctccagtcagcccagcagagacattagattgtcataggaccacaaaccctgcttgtgaactgtgcatgtgtgggatctaggttgcacgctccttatgagaatctaatgcctgatgaggtgaaacagtttcatcccaaaaccaccactccccatgccagtttcgtggaattgtcttccatgaaattggtccctggtgccaaaaggctggggactgctgcacaagcctcccattagatggagaaataaatacctccacaaatgtttcaatcttaagaatacccaccaagggcgggcgcggtggctcaaacctgtaatcccagcactttgggaggtcgaggcaggcagatcacttgaggtcaggagttcgagaccagcctgaccaacatggagaaaacccatctctactaaaaatacaaaattagccaagcatggtggcacatacctgtaatcccagctactcaggaagttgaggcaggagaatcgcttgaacctgggaggctgaggttgcggtgagctgagatcgtgccattgcactccagcctggcaacaagagcaaaacttcgtctcagagaaaaaaaaaaaaaaagactaccccctaaagaaccatagtcaactatggttcaactataaacaactgcatttaacttcaggttagcctataagttttgaatattcactatatcgacccaccctccttaagcccaatgataataataataataatagcactacaatttttttcatgtatgatattggttttcaatttttttaattttaaaaaacctctttgtaatcactagccctatctgacaaatgaggaggaaactaatgcttagctaattaagtatcttgcccaaagtgatgcagctcataaataagacagcttagaccatgtgttttactaagtcagagtagagaaaagccatttacagaagtgtggagtgactgtctggctctgaaattggacagatgtaatttcaaattccagtttcaactctttggaaagtcacttaagttcttctaccttctgttttctcatttgtagaataaggatcatagtagtatctgcttcataaggctgttgtgggaatcaaataaactagcgtatgtaaagtactattttagaagcctaaataagtgacgagtacatgaaacaagtatacacaatgtaaattttcaaatgtacaatctctagattactagctgatgaatcattaggttctaattagggaaacagatattatcccctaaaatttgctaaaatttggtcaggaagtcatttatgccttaatgttgattaataatccatgtatctagctggcttggagaaagaataccaacaacctgggagataatttgttgaaatacaagaaacaacatgtaggaaaagagaaaggtaaagaaattagcactagacctactcactctctcacttgatcagcctttactcccttacctccagttcttccttttctgcttttataatgggtgcttgtggtataaataaaaggaggtcaggctataaattcagatgacccaaattgaagacgagtctttcatagagtgacctgagatctcaatatctctgagtcctaatatattcatctgcaaaataaagatgataatgcctgctaatacacctcattatgcatgtgagagcagtttattgtatatgtgtattttattatctaaaattagtcatactagatctagatgtagactggtttcctgctttcaaccaatttatgactaaagtttttagagtctttaaaatatttagtttggggtaatggtatctagatattttaaaacttttccagggtagcatactgaactgcttatgatatagaaaattttcacttttttttgacaaatgaaatgttgatatagctttactttaatggttaagagaggggatggctttgaatactttggagacacatgtgcaacctgtgttttacatgcaatccctataatataaagatctttcatatgataaagttttctttataaagagagaggatttacaagtcacacatgaaaaataatcttgttattttacaatcacagtttgcagctgccctgtatattcattatctagaaggtaaaagtggacaaatataatttggtaaggttgatcatttcagaggtgaatgtagactttgagctttattaactaaagttgaaaattagaccaccagatttcaactacccagcagtaattaattccagcatgtgaagcttaattaaggaaaaacaaaatacattgcaaattgttgaaaagaaaagccaccaactgatgacacaggactatttaaatatattaaagaaatggtgcagtatgttaagcatgtaattccgccaaaattctcccagctttattttgtcttcctttccatatccttggctctcaaaaattcattctcagttctttggcaaaagagactggaagagaccagaaggaggagagggggagtggacagctcatgctaatgccacttttcatttcattttttttgaaaaatcctactttgtgcatataaaatatagttcatttcttatcctgagagttaccctggcatatggctcaattggaaacatcaaggtttttagttctttttaaaatggcttgcctcttttccagacttttcttcagatgtattgtcaatgccacttttagagtctatcacccttatattggtaaaatcttcttcactttctggccaggaaggtactgaccatgatggtaaatgaatagtgagtgggacaagtctgggactgattgtgaaagcacccatctaagcagttcctttttcagatattattgagcttgtgttgttggagtttttagtaatataaaagacatgttctctagacccagaaagaaaactcacttctactttttactcttctattgagttaagtaatccaaaggcatctattgaactttataatcatgctctgaaatctgtgtgctcaattgaaattccatgagcccagtctaatcctgatccttcttgataaaatacaatgctgattaatgctgatcttaagaacatttctatgtatctgaagatttttaaactcaatgcttgtctggtctggtattggcatgactaaaatatccaattttaaaagttgaatgtgggctgtaagaattaatatcttgttctattgaccatcttggttaaagtttttggtttgcaaagtataaaaatacttgtccaatttaattcatcaagactgttctgcattattctgcaataaatcctgtatagagtccactgaatgcatggaatcattggataatggcagactctgcccaaagaggggaaaaaaagatagcctaaaagtaagtatcaaatagggaagttttgagtatgaaataaaagataaaggtaaaagaaaactggagggagataagtagtttgttccttatttttcctaaatggaaatatattttataatgttttataagaaatataaacaatatttctcttaaaaagtataaaaagtgttattctttgtttgcaatgctaagaaagttttcatgatactttataaaagtgactttcgatttctggctggcaataatttctgagtcctgaggcaattgtcagtcactttttcaaattggagaatacagtaatagttttaagagtatacccttattttcagctcaatatgtacattctaaatctaaatatcatgtgtaaacaagtatacatagagcttcatgtgacaaaaatatacaagttataaaaattcattcacaatcagtaacatacaaatgtctgtatccagaaattttgaaggactgagcaaggttatatttttccttagcacattcttcatctattttccatttttcttacctggcaggcagctaggggctacagagtcaaataatgaagttgtctttcatttggatatagtttattaatgggaaaacactaatccattaatcaaccgaagtcagtaatttttttttaaaaagtatcttctttggtaacagagatcacatacctcttaaaaaggagccattatctccatgggtttctcagctgaagttaaaagtctaaaaatgattttcattcattcctcattaatatgcaaaattattcaaattagatagtaattaaccatctactcagtagaaaaccttttcatgataatttatgataaactcagttgccgctttgattgagattgatttttggtgttgagaatctatcatgaatacaaaaaagcacctgaaaaaatatttttaaacacctaacttattgcttagctaattacatggtagccatcttcacagactgttccaaagagaagcttatcaaataagatcagtccaaaaaaaagctgtgcagtgcatacactcttcccatatttatagtaaatctcagcccagagcacaatgtctggatgcctctgtttagttgactcatatcatttttggacttattattctttaattgaactaactgtcacactccagataagactgcctggctaatacagaatttcaataagaggcaaactatggaaattttcacatatcctcacgatcaattgatttcacaggatattttactcaatgggctcagttatgatttgtaaacagacttcagttttactttctgcagatgagaaagagacctcagtagtaggtgatgaaagggtgattattatgtgcttgtcaggctagtggaagtcattttcattctcaacaacaaaagctggagttgagtatcggtgaccatagggtacgcaactggatctaaacactgaagactgctattcaaaacgttgctccctgagagtaacaaaaacatggggacacagttagtgaccttctcttagcactttttaaaaatacacaaaggaaaacacctactactttcagtacctatttggttgcagagatcaactatgggtgagaattcctgtggcaatagatgaaaaggaaaatctgactccggctgggtgtaggtggctgcctcaatcatccacttaaaagcattttattatgggatcagaatagtacatgttatattttggcaagcattttaccttcatttatatttgtatgcaagaagattctagatgttatttcatttgctcctctgtcaggtatgatggacagatactgaactcattttccagatgaagaacatgaggcctgagtggtgtgactgttaacgaattaatcagccagttagatgagcagggactaggacttggtgttctttctgcttttttcttgctagctacttggtatttttcaaaatgtctcccaaagatggcctacatcagaatcatcaagggtgcttattagggatgccacttgcgaggccccttctcagttgtaccgtgtcaacctctggagaaggcatctaagtaattccattttaaaagtacctgcccaggtaattcttaagcgcgcacacacacacacacacacacacactcacacacacacacatttttaatccactgcctatagctttgcctcaccaaacagttgatctcccacccttgcaaaatgtatactatatcttcagagaataggacaaatggggagtgatagccttgtgtggatcctcctggggattgtctgacaaggtgaattatagggtaattagtaaaatatcctgaaaacattgttctgaattttcccagcaatgtctgaaaaggttaattatataataatgagcataagcttaaacaaagaggagaaaaatctgcactcaaaaaagtaacaccttaaaaaaattttgaaaggtgcctctacaaaactgagtgaaatgattgcaatttgaagcaactgctagttcccatagggaacagtaagttcccagtaaagatgatatgtgtgcacattttttttgttaggattctaaaacaacagaattagccataagctaggagttgctatgatttatgttttataatagcccctcctttccatttcctggtcagcattctggatgattatttcatttagcacatattctctagtttgtttctttcgcttcaagtctattttacattttcctgtactgaactgcatttgccatctgctgatccaattacttatacaatccaaatccttttgagtctgattgttttgttcctcgttatttgctcagcctctagttttagtatcctctgtaaactctaaaatcttgttttcaatacctcatctgaatttcttatatacaatacaacccaattagctcaaactttaggttttcctaaggctacttgtgtttgaggggatttagataagttgagtggatttggatcctaacaaagtcctgacaattcactcttctaaggatagctgatccatcaaaaattgaattattgcctttaaattgaaagaaattaaaaaaacaggaaagatacgcattctaaaattctgctatatatacagaagaccaatatattgtcgtcaacatcgtcatcttttttcagctttagtggggtttaattgagaaaaactgtatatgtttaaagtgtacaatgtgatgtttaaatatatgtatatgttgtgaaatgattaccacaatcacgctaacataaccatcacctcacatagttaccttcttgtgtgtgtgtgtgtgtgtgtgtgtgtgtgtgtgatgagaatattcaaatacaattgtaagctaagagagtagattttgaatatcctcatcatgctaagagagtagattttgaatattcttttcacaattagtatacaattttttttagattttaatttttgtgggtacataggtgtatatatctatgggttacatgagatattttgatacaagcatacaatgtgtaataataacatcagggtaaatggggcattcatgacctcaagaatttattctctctttgcgatacaaacaatccaattatacttatagttatttttaatacataataaattattgtcgattataggtaccctgttatgctatcataatactaaattttattcattctatttttgtactcactaatcattcccactcctcttcccagcttctagtaaccgtaattctatatatatctccatgagttcaattgttttaatttttagttttcacaaataagtgagaatatgagaagtttgtctttctgtgcctggcctatttcacttaacttaatgtcctccagttccatccatgttgttgcaaatgacaggatctcattttcttttacggctgaatagtactccattgtgtatgtgcaccacatttttgttatccattcatctgctgatggacacttaggttgcttccaaatattgactagagtgaatggtgctgcaataaacatagaagtgcagatatctctcctataaactgatttctattctttgggatatatacctagctgtgagattgctggatcatatggtagctctatttttagctccattttttcttaggaacttccaaactgttctccacagtgattgtactagtttacactcccaccaatactgtatgagggttctcttttctccacatcctcaccagtatttgttatttcctgttttttagataaaagtcattttaactgaactgagatgataactctttgtagctttgatttgcattttcctgatgaccaatgatgttgagtaccttttcatatgcctgtttgccatttgtatgttttttttttgagaaatgtctattcagatcttttgtctgtttttaaatcagattattagattttttccataaagttgtttgaacttcttatatattctgattattaatctcttgtcagatgcatagtttgcaaatattttcttccattctgtgggttgtctcttcacctttttttgtttcctttgctgtgctgaagctttttagttagttgtgatcccgtttatccccttttgctttggttgcctttgcttgtggatattactcaagaaatttttgcccattacaatgtctagagaatttctccaaggtttccctttagtagtttcagtttcagttcttagatttaagtctttaattcatttttatttgatttttgtatggggagagataggggtctagtttcgttcttatgcgtatggatatccagttttaccagcaacatttattgaagagactttcctttccataatgtatgttcttggcacctttgtcaaaaatgagtctattctagatgtgtgaatttatttctgtgttctctcttccgttcttctgatctctgtgtctgtttgtatgtcagtaccatgccatttcggttactacacctctgctgtatactttgaagtcaggtaatgtgattccttcagtagtgttctttttgcttaggatagctttggctattctaggtcttttgtgattccatataaattttagaattattttttctattttgtgaagaaagtcatcggtattttgatagggactgcattgaacttgtagattgtttccactagaatggacattttaacaatattgattcttccaatccaagaacttggaatgcctttccatttttttgtgtgtcttcaatttcttacatcagtgttttatagttttcattgcagagatctttcactcctttggttaaggtaattcctagatattttatttgtagctattataaatgagattaatttcttgactcctttctcatattgttcacttttggcatatagaaatgctactgatttttgtatgttgatcttgtattctgaaactttactgaatctattagttctaatagttttcctttaggttttttcaaatataagatcacatcatctgcaagtaaggataatctgatttctttctatcccatttagatgccctttacttcttgctgttgtctgattgctccagctagcctttccagtaatacgttgaataacagtggtgccagtgaccatccttgtcatgttccaaatcttacaggaaaggcttttagtttttccccaatctatgtgatactaactgtgggtctgtcatatatggcctttattatgttaaggtatgttgcttccacctccagtttttttagggtttttttttaatcatgaagggatgttgaatattatcaaatgcattttcagcatcgattgaaatgatcatatagatttttgttcttcattctgttgatatgatgtatcacattcattgatttgcctatgttgctccatctttgcatccctgggatcaattccacttggtgatgattagtgatctttttaatgtgttgttgaatttgttttagtattttgttgaggatttttccatccatattcatcagaaatattggctggaagttttctttttttgatatatctttgtctggttttggtatctgggtaatactggccttgtagatgtgtttgaaagtattccctcctgctctattttttcaaaatagtttgagtaatattgatattagttcttcaaatgtttggtaaaatttggcagtgctgccattgggttgtaggcttttctttgcacattttattatggcttcaatttaattacttgttcttggtctgttcaggttttggatttccttatgattcaatcttggtagattgtatgtgtctaggcatttatccatttcttctggattttccaatttattggcatatagttgcttatagtagcttctaatgatcctgcaaatttctgtggtatttgttgaaattttttctttttcatttctgcttttatttatttgggtcttctctctttttttaatagtctggctcaaggtttgtctactttatctttttaacaaatcaacttttcattttgttgatcttttgaatttttttcatttcagtttcatttatttctgctctgatttattatttttcatttcagttttatttatttttctctaatctttattatttcttttcttctaattttcaatttggtttgctgtcttgattttctagttttttaagatgtattgttaggttgttcatttgaggtttttggctttcttgatatagatgtgtatagctataaactttcctcttagcgctgctttcactatatcccataaattttggtatgttctgtttccattatcatttgtttgaaaaaaatgttttaatttccttcttaattttttcattgacccactggtcattcaggagcatactgtttaatttccatgtgtttttatagttaatacaatttctcttgatactgatttttagttttattccattgtggctagagaaaatacctgatataatttcttttttttattttttaagacttttttgtgagctaaaatatagggtatctttgagaataatccatgtgctgaggaaaaaatgtatatcctgcagccattgaataaattgttctgtatatatctgctaggtcatcttgttctatagtgcagattaagtctaatgcttttttgttgattttctgtctggatgatctgtccaatgctgaaagttgggtattgaagtctccagctactactgtattggggtctctctttagccttaataatatttgctttatatatttgggtcctccagtgtcctccagtgtcacatatatatatacatatatatatgtgtgtgtgtgtgtgtgtgtgtgtgtgtatagtgtatatatatacaattatatatatatatagtgtgtgtatatatatagtgtgtgtgtgtatatatatagagagagagaattgttttatcctcttgctgaacttacccctttatcatgatataatgaccttattgttggcctctttttacagtttttgtcttgaaatctattttgtctgataaagcaaagctactcctgctctgttttggtttccactgcatggaatatcttttccatccctttttttagtctttttttcatctttttttttcagtctttatagatgaagtgtatttcttgtaggtcacagatcactgggtcttgtttttctatccattcagccactctgtgttttttgattagagtgtttagtttttttatattcaatgttcttatttataagtaaagacttaatcctaccattttgttatttgttttccagttgttttgtagacttctttctttcctttcttcctgtcttccttttagtgaaggtagttttctctggtaatatgttttaatttcttgtgtgtgtgtgtgtgtgtgtgtgtgtgtgtgtctgtcgtattttttttaggttcccaggaggcttctgaataatatcttataacccattattttaaatggatgacaactaaagattaattgcataaacaaacaagcaaagagaaaactaataaaactctacacttaaacttcttatccccacttttgaactttttgttgtttctatttatattttattgtattgcctatgtcttgaaaagttgttgtagctattatttttgatcttttcatattttagtctttttttttttttttgagatgaagtctcgctctatcgcccaggctggagtccagtggcgtgatctcgactcactgcaacctttgcctctcgggttgaagagattctcctgcctcagcctcctgagtagctagcattacaggtgcatggcaccatcctgggttaatttttgtatttttagtagagacggggtgtcagcatgttgatcaggttgttcttgaactcctgacctcatgatccacctgcctcggcctcccaaactgatgggcatattttagtctttctactcaggatataagtagtttatgaaccacaattacagttataatattctgtgtaactattgccactgagttttacaccttcagatgatttcttactgctcattaatgtcttcattttttcagattaaaaaactccctttagcattttttgtaggacaggtctggtgttgatgaaatccctcagcttttttggtctgggaacgtctttatttcttctttatatttgaaggatattttcactggatctataattctaggataaaagtggggtttttttccttcagcactttaaatacatcatgccagtgtttcctggcctgtaagttttccactaaaagtctgctgccagatgtattgaagttccttcctatgttatttgtttattttctcttgcttttaggatactttctttatcatagatctttgagagtttaattattaaatgtcttctttgggttaaatctccttggtgttatataaccttcttgtacttgacttttgatgtctttctctaggcttgggaagttctcagttattatccctttcaataaactttttactcctatctctctaccttctctttaaggctaataatttagatttgcccttctgaggctatctggcaaaccttgtaaatagatcttgtagatattcattttttaaaattattttttcttttgtcttctgactgtgaattttcagatagcctgtcttcaagctcactaattcttcttctgcttgattaatcctgctgttaaaagactctgatgcattctttactatgtccattgcattttcaactccagaatttctgcttgattttttaactattcaatctctttgttaaatttatatgataggcttctgaattctttctttgtgttatcttgaatttaattgagtttcctcaaaacaactattttgaattctgttggaaaggtcatatatctctgtctctccaggattggtccttgctgacttatttagttcatttggtgaggtcaggttttcctggaaggtcttgatgcttgtggatatttgtcagtttctcagcattcaagagttaaatatttattgtagtcttcacagtctgggcctgtttatacccatccttctttggaaggctttctcagtattcagtattcaaagaaatttaagtgttataatctatgtttttagtctctgcagccatatctgcatcaggtggcatccaaagcccagtaatgctgtggttcttgtagactcatagaagtactaccttggtggtcttggataagatccagaagaattctctagattaccagacagagatttttgttctcttcccttactttctcccaaacaagtggagtctctttctccatgttaagcttccttgagctgggggagggatgacacagcaccctagtggccaccaacactgggactgtgctgggtcggacctaaagccaccatggtctgtgtcttgcccaaggcccacaataaccactgcctggctaccacctatgtttgctcaaagcccaagagctctacaatccgcaggtagcaaagccagccaagcttgtctccttgcctttagggcagtgcattctccctggtcccagctaggtccagagatgctgtccaggagccaggacttggagtcaaaaatctcaggaatatacctggtgccttattctactgtggctgagttggcacccaagccacacgacagagtccttctgacttttctttcccctttccataagcaaagcagcatctccccaaggccaccactgccttaggcctatggtgagtactgcctaaccaccaccagtgttcactcaaggcccacgtgttctttagtcagcttttggtgattgcctccaggcctaggaccctcccttaaggaaagtggggttccctctggcctaggactgttctggaaatgctgtccaagaaccaaggcctggaatcagggactgcaagagcctgcttggtcctctaccctactgtggctgagctggtacctaaggtggaagacaaagtcccctttactcttctctctccttttcccaaacagaaggagtctctccgtgtagccaccaaagctgggaatgtgctggatctcacctgaagctagtacatctctgagtcctactcaaggcccacagaaagtactgcctgggtgtcattgctgattattcagggtccaaggctctttagtcagcaggtgacgaatccttctagaattaggtccttcacttcaaggcaatgggttcctttttggcccagggagtgtctagaaatgttgtccagaagctagggcctaaaatgggggctgttggactctgcctggtgccctatcctactgcagctgagctagtatccagcttgcaaggcaaagtcttctttactcttccctctcctctcctcaagcagaggacaggagtttctcccagagctgtgagctgcaccacctggggctggggaagagtggcaaaagcactgccttggctaccccatctggtgtctcactaagttgtgggccctgtagatctcctggccccaagcccagcacagcaccaggacttgccgaagaattgcagaccttgtggcctacatggcctttcaagtttctttggtactccagagtactttagcctgctatgaaaaggcttatcggaactcaggttctaactattgtgatgggcaattctcctctggctagggcttgtctaaatgctcctctgtgtgtgccagctgagttctgccccatgttgctttccactgtgacagtacaactctgagttccaatgcaaaattccacaatcactgtgcgctccctcccccaaacacatagattctctttctgggccacgcagccactgccaggggattggggaggggtggcatcagcaattcaagactgtcttttctatctcctttagtgcttctttctgtgatacaaagttaaaacctggtactttgattgcttgcttggtttttagtggttataaaggtgcatttttgtgtggacgtttgattcaatttggtgtctgtgaagacttctatttagccgttttgctccacttccaagcccaatatattaactacagtcaccatgctgtacattagttctttggaatgtattcatcttacaactgaaagcttatacccatggaccagcatctcctcatttctcccccagcccacacccaaacactagcaaccaccccatctattcttgtttctatgagttcaattttttaaaataccacatataagagatatcatgcagtatttgtcgttctgtgtctggcttatttcacttaatataatatcctcccggtttatctatatttttgcaaatgagaggattttcttctcttttaaagctgaataatttttattacatatacatgtactgagtatttttattatatattcatacatattatatattatgcattcatatattatatattcatgtccactcatccatcaagggacaattaagttgcttccatatcttgactagggtgaataatgctgcaatgaacatgggaatgtgggtatcttttcaggatagtgatttttttttgtacgtatacccagtaataagacggctggaccatacggtagttttatttttgattttttgaggatatttattgtttttcataatggctgtaccaatttacattcccaccaaaagtgtacaagagttcccttttcttgacatccttggctgttatcttctaaattttttattacaaccattctacaagatttcattatggttttgatttcaatttccctgatgattagtgatgttgagccccttttaatacacctattggctatttgtattcttcttttgaggaatatctattcagatcctttgcccaatttttaatgtttacttgattttttgctactgagttgtatgagttctctagatattctgaatattaaccccatatcaggtatacggtttgcaaatatattatctcattccatagtgtgcctttgccttttgttgactgttattttgctgtgcagaaatgtattagttcgatatagtcccactttgtttttgcttttgtcacctgtggttttggtatcatatccaaaaaattatcaccaagatcgatgtcatggacattttctcattttcctctaagagatttatagcttccaatcttgtgcttcagttctctatccattttgagttgatttttgtgtgtggtgtaacatagggatcaactttctttttttttttttttggtatatgtatattcagtttcctcaacatcatttatggaagagactaccttttacttattgtgtatttttggtgcctttgtcaaaaattagttgaatgtacgtacataggtttgtttctgaactttctattctgttgcattgatctatacgtctgtttttatggcagtaccatgctgctttgattactatggatttgtaaataatttgaaatcaagaagtgtgatgcctacttctttgtttttcttactctataagattgctatagctatttatgatcttttgtgttttcatacaaattttaggatttttctattctatatatagcattttttttccttgttttgtccttgtctggctttggtttgaaggtaatgctagccttgtaagataaactagtagtgttccctcctcttcaattttttggaagagtttgaggaagactggtatttctctttagatgtctgatggaatttaccagtgaagccatccagttctgagctctcatttttccggagatttttgattacctattcaaaatccttactcgttattcatctgttcagatttcacctttttaaatataaaattcatcttattgattatctttttaaaggaatttatcaacttattctaggttatccaatttcattgccatataatcatgcgaaggagtttcttatgactgaatttctgtggaatcagctataacatctcctctttcatttctgactttatattttattaaccttctctttttttacttagtccagctaaaggttatgttgtttctcttttttaaaattttactcttttaattaatcttttctatcatttttctagtctctacgtgatttatttctgctctaatctttattatttcctttattctactaactttgggcttagattgtttgttcttctttatctagttccttgtggtgtaaactgaagtttttatttgatatttttctttgttcttcatgtaggcatttaacgttataaacctcccttagcactgcttttgctgcattccataattttggtattttgagtttcaactttcatttgtctcaagataatttcttatttcttttttgacccttttgttttcgggagcatgttgtttaatttccatatattgtgaatatttcaattttattcctgttattgatttctagttttgtatttttatttttggaaaagatccttgatatggtttcagtcttcttaaactttatatgacttattttgtggactacgatatgacctattctgcagaatgatctgtgtatgcctaagaagaatatgtattctgctgtgtttggatgaaatgatctgtatatgtcttttgggtctaaagggtagttcaagtccaacattttgttgtttattttctttctatatgatccatttattgttgaaagttgggtgttggagtcatcaattactgtattgctatttcttatttctttctttttcttttttttttttttttttttttgaggcagtatctcactctgttgccaggctggagtgcagtggtgcaatctcggctcaccacaacctctgcctcccaggttcaagcgattcttctgcctcagcctcccgagtagctgggattacaggcacctgccaccacgcccagctaatttttgtatttttagtagagacagggtttcaccctggccaggatagtctcgatttcttgacctcgtgatccacccacctcggcctcccaaagtgctgggattacaggcataagccaccacctgctgtctatttccttcttaagattttaagtgagtcttagcctgtagttgagtttttgggttgttttttttttcttatccatccagccattctgtcttttgatgggcaaatataatccatttagatcaaaggtattgatagatcgagatttgcaattgccaatttgttcaatgttttctggctgctgttttgaagattctttgtttctttcttttcctctcgctgtcttcctttgtgatttgataattttctttagtgcaatccttggattctctttgtcttttgtgtatctactataggtttgagtggtgtttgtttgtttgttttgtgaccatgaagtttaaataaaacattttatagagtctaacagtctattttaggttgataactgcttgccttttatcatgtactaaaactccatacttttgctaccccaaactttgcattccatgtttctgatgtcataatttacatatttttatatcatgtatctgttaacaaattattgaacctatagttatttttaatacctttgtcttttaatcattatactagagttggaatttacagagtactattacagtattaaaatattctgaatttgactgtatactaaccactgtgagtttcatactttcatatatttttatgttactaataactgcccttgaatcaggttgaagaactttctgtagcatttcttgtaagacatgtctaatggtgatgaactccctccaggtgatgtctgttatttctgaaggacatctttgccagggaaagtatttttttccaacatgttgaatgtattattccactctctcctcacctgtgacaaaagatagacttatggtagtttccccagtacgtaactagcctgttttgtttctttgaaaattctctctttatgtttgattttagactgtctgattttattctgtcttggtaaagtcttcgtcaggttgaagccatttgggaatctttgagcttcatgcacctaggtgttcatatgttccccccgatttgggacattttcagccaccatttctttaaataagatttctgcttctttctttctcttttctactgaaaatttcaatattcaaaccctagttcctttgatggtgtcccatacctcccatagcctttctttattccttctcattcttttttttcttttttctcctctgtatttataatttcaaatagtctgaatttcagttcactgattctaccacttgattaagtctactgttgatactctctattgcacttttcattcatttattacattctttatctccagaatttctgtttggcttgttttgatgatttctattttttaattgaatttcttgttttgttcatgtattgcttttctgatttcattgaattgtctatctgtgctttttgtaccttgcttaggtttcttaaaacaattattttgaattctttatcagaaaattggtagatctccatttctttggacttggttgtgagaataattggggatttctttgggggtctcacattgccttgatttttgtgtttcttgaggtcttgcattgctgtctttgcatttgaggaaacaaccaccttcttcagtcttttctgactaattttggcagaaaaaatgccttcatcagtcagcccagctaaagattcttaaactgtctcagatcttttctgtttgtgccattctacacctattgattcctcttggtggggtgtgggggaattcttaagactgtatgccttcttccaaccccaaaaatccaggctggatgctgagagcttcccatttgttttctctagggcagtgctctgaaatcctgaagtttttaggcctttttacaattcagtagggtcaaatcatctgtgtgagatgcttgcttttcctatccttaggtatgtgctctggatgctggcctgggagaagaggagtgagacacatggagttttgggggtgtcccttgtgggtccggaggtaaaattcatgggccagcttcctggcagagttcacaaagtggttagtagggtctgtgacctctcttctctgctctcattctctcccaatctttgaactgtgctgattaccttagtaatctgggtgaggtaataaaaaagtataccttttgggaaatatcctgcatggctagaggaacaaggtgctccctcactgtgctcttactttctgtcattagagaaactgcagactaaaggggacactcttgacaatgagctgtgctgccttggaggaagggtaacagataaagtgaaactgttttattaactcttcaacacataaactttttgatattttgctccaaggtgtgctgggacttttccggactccaggactcctgcaaagatacttttttagatgggtcattctcaaaattgctgcatctgtgggggagaaggaagtgatggtaggaagctcctattccaccaacttgcttatgtagctcccatcatctttattaatgttgccaatcagtacctcatcaaatatttattaagttctcattctaagaccttctcaatgtaaaatagtaaatctgcccaaaaagctagattgaggccaagccatgggaccaaactaaaactttaactgtccagcttacttgcaatttatatttatttctgcaattatattttttcaaccagaccagtcatttatttaattttgtcaacataatttctcttgaaccttataggctgatttttccagcattttacctagcaaataatggtaagtttaagaacactaaatgactcataatgtattcacgtttcatttgccttacaaaaacccaactaagccacacaatgcttaagcaatagagaattccacattagtgatgcaaaattaaataatttacttttactccttgctttcatttttttgttttgttttgttttgtttttttgtttttttttttttgagatagagtatcactctgtcctctgttgtccaggctggagtgcagtggagggatctcagctcactgcaacctccgcctgttttatttattaatttctatgataaataaatatttcctgttgtatttattaatttctatagtagaatatgatgtatttttattgtacctcttccttatccttatacctacagagaagtcattaaatattgattggataaataaatgattgaattaatgaatattaaactctcaataaaaatttctaaaagtttagttgttagtaatccagctctgcattcaattatgtgtagtttggtcttgctaaaactctaacacttctggattactgctactggttattctgctctccagataccgcatcctattttaccaagctccttccttacctgatcacagtttaaaacaatatatctgctctttccccagcaggattcccagattctagttctttcttccaggcaagttgttcttttgtgataatactgaaacatctgaggttggcagaccaggcttgtacttcaacatagcataggtaaaggtagcttctgggttagcattctgagaagtactgtagaccaattcagaagcaatagaaatgaacacatgctatgaaatcttttaattacaaagacataaagtatcaaatacttcttcattgctttggggacctaggataccccattttttgagttcagggtctttactctggggttcataagaaaaatactaagcacccctcatgctcttgaaatgcattattttcaataatcccacttttctttctttcttttcttttttccttccttcagaaaaacaaacagaatgaaacaagaaaatggcactgtctctctgacactaaggacacaaatcacagcttttcttagtgcatcaatgatttactgtaaagaattacgattcttgttgtaattgtattctactttacatattttgaatagtgtaagtgcattatttacatggtaattatataaataaatctgtctgtccttgaactaagcattgctatttagaaagccaggaagtaaacagacccagcggttttgaattccattcaaagatctgcacagcaatgtgtaggagttgaacttttctccttagaagcaatagcagaggcatgtaagaaaaccatactttctttacccttccaactcagaggatcaaatcacttttggtaacttctgcagctcttaacaatctcttctggcatttagaagatgctatcagctattattgtttatctttcttttttttttttttttttttttgaggcggagtcttgccctgtctcctaggctggagtgcaatggcatgatctcggctcactgcaacctccacctcctgggttcaagcgattctcctgcctcagcctcccaagtagctgggactacaggtgcccgcaaccacacccagctaatttttgtatttttggtagagacaggttttcaccatattggccaggctgatttcgaactcctgtcctcgtgatccacccacctttgcctcccaaagtgctgggattaatggcgtgagccactgcacctggccttattgtttatctttcattctttaaaatatacttaccaagtcaactacactttaaatcatttaaaatttattctttatctttctctagaccctagcacacactgccttctctataacataataatgttcaataaatgttaatcgataatatatattaattttatgttaacaaatatttactgagatgctgaactaaatactttggagaggaccatgggcaagacacagtcttggaaatcttcaaggaacttataacccagtggaagaaaattgggtactggaagcagttatacaaagtggaatatagtaagttcataataaaagtacaaggtgataggagatttaaaaggagggaatccattgtaatttttgtaattgaaattgtactttctagaaaacaggataccacttaatgcattatcagattgatgctgattgaaataacagcttattcttgctttctcttaatattactttttactactaactttcatggctttcattatacttcttttaggttactcccatctagtagctggaaaaggcctctatgaaagcctgtttctctcataaacagaagttgtcacatatctacattcaagcaaaatatatctagtcaatggagacaagatgagagatgtatgcatataaacctgaagatcatgtatctctgagttcatttttttaagagacttgtcttccttctcttgctttcaaagttatttatgacttcaaaaaaagaacttgctttcctcttcttttggaaaatgctccatggttagtctaactttactcactaataacaattcctcattcagagatgcaataatgagacataatattacagaaactccagagtatgagcaacacaggcagttcaaactgagaaacagacaatagtgaagcctgaaactatgtttgaagagggatctggaagaaaagacaagagtagaaaagggaagagcagagaaggaagcaatctaggtccaaacagaatgtatacatgcttggagccagttctcttagtttcattgaatcataatgaatattttcagaaacaactttacaccactttatttaagcctccattttgtgccttttattatcaagtgttcattttccattagtgatttccagatttcagcactttcattgtcttttccaaagttggtgtaatttttatatgcaaacatgtattgatcctgctcaaaatcaattcttgttttgtaaagggcttcactttcatttttttcttcagtgatattattattcctatatcatctccagctaccagccacttttttctataataaaacagacacattactttccatacctgatgtatattttgtatgaaaggtatatacagattgttcatttattcaaataaaaaaatgaggacacatggctgcacagagcacatttcctttggtttatatgtttttttccacaaaaagcatatagtgctataaaaattatattacatttacccatctatacaaaatgttactttgattgagaaagtatagaattatgtgaaagtaaatgcacatttcagcaaaaagtgtatcagttaacaataatattgcattttattttgtccattgttaactattgaagttgatggcatatttttctgtttacacttgcttgaaattaggtagaacacttagttcttatgtgttctttaacatgtcttggaaaagatcagaataattaatttgaagtatcaagaaatagccttttattgggtattgataaatttttttacatgcagtttcattaattagtaaagatgcccattgcatccctcacaattgacaatgagatattgagattgtaccttttttaatatttaaaatactaattgttctcgaaatagaaatctcacagtacactcagatatcttatactttcataaaagtcattgtattagtcaaggttctccagagaaatggaaataatagtttagatatagtacagagattatatatagagagatttattatgatgaattggctcatataattatggaggctaagtcccatgatctgctatctgcaggatgacaccccaggagagcctgtggtgtaattccagtctgaatctcaaggcctgagacccaggggaatagataatataaatcacagtcaaggaaaagagaggactcatgtccgagctcaagcaagcaggcaagaagagaatgagttcaagtcctcctgtcctccatttttttgttcaactcaggacctcaacaggttagatggtgcccacccacgctgaggaggacaatctgctttactgagtccactgattaaagtgttaatcttatctggaaacaccctcacagacaaaaccagaaataatatttaatctgggcactgcatggcccagtcaaggtgacacagaattaaccatcatacagtctatttagaaagagcactgtccacactataacatgttctcatacaaatagggaaaaaaaggtcaaacattttccagtctttcttctttcctttccttcctatattattttacatacatttatttatatgttagttcttttgaaagaacattattatcactgctacttacttcaactaaagaaacaattaaaactcaacttctgttctcacagtttcacatgaggcaatgaaacaaataatgctaactaaactattacttcacgtagaaatattatgaaataaatttagatattaaatgtatatactagaactcatctgcatcctgctctccaaaaaaaaaaagacccaaataaaaattaccactatgaaagtcatcaataacattttacacaatgtattattacagatcttagagagtaacacaagaatgccatctggatctaaatgcctcctgagaacaagtactgattctgattatctgtaataataactcctagagtagaaattcaactttaataccaaacttcttccatcagtttcctagaaaaactttaaactcactcttccgtaagaaatctggacactgaaatgccacaaagctgtggataatccttttggtcacaagaaatatgtcctctaaactaagaaatctgttaattgtactaaatgaagcacacagtgacctcaactaaagtcagctcccaaatttcagtgttaaaaaacatattaagagtgacatataagttctacatgaatattgacactatgctttttacatatcatatgatattgtgagcaggatggctgaactggacacatactgtgttttaatttgatctaccatgagcacccgaaatagaaataataaaaaacacccttgctttagaaacatgtgtggattacattaagaaaagaaagaggatactaaatctgatgtttgtatatattataaaggtatttctcaaatcacctttctgacaccttttctatatcgatcaaatactgttagactgacattgtctgacctgtctaaatccatcaatagctaggctcttgatgcctgattcccagggtactttagctcttagtcttaaatatgaatattattcataagcttttttactaaagagatcaatcattatgtgcatattaaatttgcattattgctgctgttaacagtgccctttggctggccacagattacactcttatgcataggctgccatagacaataaacatttcattagtgacacttgaaatgtactcacaggataccatatccccaagagtgtatatgtgaattataagaaacctgtttaatgttagggcaagtacatattccctatagtttgcattgtatttctattctgggtgccacaaaccctaccattaaatatattttgcccacttaaaaactgctttgtggggatggcatgtcttaattgttcccaagacaatgcataatgcactgctgtgatgggccttcagttaaactaataggcaggcaagttgctgcctggcttcagcagattttaaagcactaatgaaacacactgtacgaaacaacagtgacaaaaactttttagcaggggaagaaaaataagattccagaagaggtttcctagtttttaataaataaaaataaacagaaaatgtgttttactgactcattctgatgcttctattgtcttctgtacataatatattttaagaacagtgaaatattcgtgccaaattttccaaagcaactaatttgtgtataaaaattatgcagaggaagacaaaatcagctagttgccattatgaatcaggcagttgtgcatgtaaaacaggtaatggcatattttgtaccagcaattacctttcttgcacctgtgagtctctgttttgcatatgtaagtaggtccctgtttattgcatttaaagctgctacctcagcttctttaggtaaactttatgttttactaaatgtcattccaaaacaaaaaaaaaggggcatttctatggtgggtttatgtgtatgtgggcacgtgtgtgcctgtgtgtatgctttttaaataactgtaaaattgatgctaactttatttggttttaactactgtaccttgcagggccatgttcgatgatacaaaatatttccttttggttttatgacacaaatgtctaaatgtcctgcttctgagatgtatcaatcaaatcaaaggttcaaatttaatattatccaggtgccaggatgagagggaaaatgatacttcagtttacagtcaaccgatgcagaatgacttcacagtcaataacaggctcctgcatatatctcttgtagatccattacttcagggttcataaagtggaatgcagcacttctgacaatgccttaggattttttctctccctatatattttttaattgttacttgcatagaaaagggaaaatatcaaattcacttttcataggataattttatataggcattataagcaattaaaatccacagtgtttcaaggacacttcacagcttttcaataaactgaagcaaacccctgaatccatttttataatcctactgcatatagtagctagtcattctgaagctatcaaactgaatgcttgaatacttcttactggcctattatttatcattaaatatccaagaaggtacacaagacatgatctatccagcagaccacaccactaggcacatgtctaagaagaaaaatttcaagcaaaagtatccaattgaacttcattacttgccaattttatggcaaatagcatactatatttgttgatttttattccaggcaactgtatgagaaaagtttatggtcaggagtaaattttagatttacaagtcaggctgtttcaaaatcagggaatggaatgtcttgcttctctcttgaggccctagaaaggggacctagaagttgtaacatgattacctaatgataatggaacttctggcacttccctaaggacaaagtttgccactgatacattgtcatttactaggtatagtgagtaagatggacataagactggacttaaagtcagctacttaaaggtcaagggtatgataaacttgatgatttatcacatatatggtgatgatgatcaccagacaacaaaagggaaggaagcataaggagcagacttttttcctttttccaactagacttagtcttttggccgaggaaagggtaaggcatagtttgccctagaggttaaagaaataataatgttctacatgtacagggtcatttctctgaaacagaggtcagcaaagtctttctgtaaagggtcagacagcaaacattttatgcttggcaggccatatggtgtctgttgcaacaattcaattctgccattgtagcaaaacagcagccatagacaattcgtaaatgaaatgggtgtatctgtgttcaagaaaatcttatttacaatgacaggcactgggccagatttggctcatagagtgtagtttgctgacagctgatctaaatgaaaaacaaacaaacagaacaacaacaaaaaaaaacctttatgagcttgaacaaaatcaatgttataagggtaagagggaatctttgccattgttaatgctcacatcttcctgcttcatgacatccatcttttggaggcgtgtacagctacagccatgtgtggggttatgaactcaaggtttctctttctttatttctcagcattatatcccttattccaattgttaccaacagataaacaataattaattttgtgtgtgagggttgtacattgggagcctgaggggccatttaagagagcactttagctatggatggacaaagaatggaaaacaaagaaatccatgaaattcttagaagtattaggatagaaaataattttttaaaaggaaaaacatggccgggcgcggtggctcacgcctgtaatcccaacacttcgggaggccgaggcaggcggatcacgacgtcaggagatcaagaccatcctggctaacacggtgaaaccccgtctctactaaaaatacaaaaaattggtcaggcgtggtggcgggcgcctgtaatcccagctactctggaggctgaggcaggagaatggcgtgaacccgggaggcggagtttgcagtgagccgagatcgtgccactgcactccagcctaggcaacagagcgagactctgtctcaaaaaaaaaaaaagaaaaacattaattcgttaattcatgcatcaggtaaacaagtgaaatggcaaaaaaaagtcatcccccttgttccctttttttcaagaagatgaagaaagaggaaaaagaagaaaaacgtggagcagtaataatccctacagcgtaccaggtgcagtgcaaagtgttttgcatgcgtttattctagcaatttaattctagaaagaatcttgtgaattagactccgttgttacagccaatttacatatgaggaaacagagactcagcatgggctcagaaacttactcaaggtcaaacaagcaaatgacagaatgggaatactctggaataactgatcagtatctacatggaaagcaagcataatgtgaattcaccaattcacatataaaatttccaagaaaagaaatgtcaagtaggtcaataaaagacccataatttttaacttgaaaaaatcttgtattaagttggctataatttatctttgatatgctctagatcctgaattatatttataataataatataagtatgtatgtgcctccttaaatttccatcatgaagatttcccaatgatagcaccattggttaccccttttcaaatctcttgtgtaaatgactcttgcctagatcgagtctatcaactgtcaccatatctaccagtataaggtctggcacataatagctacttttctgagaaaatacaaagcagagcataattgttgtttcctgccaatcagttctgttcaccatacctgtaaagtttgctgagaaatatattttaaattctcatcatgctattcactctacttgaaatatctttcctataacctagtcctcttcatggtttcaaaataaatgaatatttaaaaaaatggctttttaactttctgctcaaaattgaccccatcatttctacctatacttcattgttaaaagctagtcacatggacatggatgtatactccttaccaagaaaggactgcaagctcttggcaatgggcaggaatgtctaattctctcatatgggaagagataataaatatttgaggataataaaaagacctatcagtgcaacaagattttggttaggaaatgtagagaacatagaaaacttaagtaagacatgtaaatagtgatctgacaaagtgatacaagttattataatgaatgatttaaaatagtagttcttaatatatttagaccaacttaaccggagcaaaagacccaaaggtccactactgaatatccagatgaaaaggatttggtattaacaaagaagtagcattctacaagcgagtattatctatatattttgcaagcttttacataaatttgcattagtaggagaggaataatttatttatatccaaaatctaacacatatatgtcttaaagtctagatatagttctaaaatattgattacaatatgtatcactacaaaatctagagttaaccagaaaactttcaccaaacacagtgattataataaaactatgttttattattaagtaatttaaaaataaaaaatcagctatgagaagccatgaacaactcaggacaactgtctcctctgtttttttttggaaatttcaactttttatgagtatttacatgccacaagcatttgtaacaattgcacatattatgcagcaagaagatttcttagtacaattctgattcaaacccttaataagtactattaaagtaaaattttagtaactttacagtttactaaataaaagatggtagtatgtttaaagagtctttaagattacatggcattgttgtttactaccagaacaagagaaagaaattacacttattgatttggcttcccccattaaaagaatcctgattatcaatcaattggtatttcataggtcatattttgagattcagtattttataatatccaagaagacatcaaacaattaaaattattatagacttgataaaaaccagataattctaaattatattctgaaatctaacatcaatactttctgttcaaccaaatttatgagccttctggatgtttgctagcttactacagtcatgatatcaaaggcgagattcatgtgtgtgacagaagtgaggatgcatgagagacttaatcaactccagtttactatagcctggctatactgatctatgagccagaggaaatttgcaaataatagtgtctgatcttcatgaagaagtcttcaggaagagcagaagatatgccaaaaaaaattttttgtccatcttaattatatttcactgatgagcaccaatctacaaaatgatgaggaaaacttcccatagtaaagcatctcagttaaagtaaattctttgaaaatttaacgtgtattagcagctttccaaaactcgttacttcatcaatgccagagaactggcatttattaagtaaacaaaaacagatggtgtaatatgtaagcaactaccaccagagttaaagaggtcatgattttgtgaagaaccaagtagaaatgggtctagaaattttaaaaatgcaactctatagaatgattcccttcaggaatatattaatattcctggattagtattagtatgtaatatgttgttgggcaccaaatatttttttaaatttacacatgcacattcaaacacaatgtgtatataaaatcaataacacagatactctaggaacatgtttcatgaaatcatcttaacctcacaaacttatgggtaatttcctgccctggtctttccaacagcccagcttgacacatggcagaccactggcagtggaaaatgctttcatttattaattactcatctcctgggttacagagccacccagagggtactgtaaacagttttcaatttcttcctacatataaatcatttagtaactcttagttcaacacagctcctaccagagcaggcaacaaatatatctcaggatgcaaacatatctatcacatgagttgtgtacctgttgcctgactcacactttttttctgtatagccctgtatgttggtagtctaacaaaacttttcactggcattgagagtcaagtcagaaccttctatattattcaaatgagatgggctcaaattatatcattctcgtaacattcctatacacttttccttttctctctctttctcttcagcgatttctccacatttggtgtattttcctattctgttaaaccagatttataaataagcattgctgagcctctaagtactctctcctgaaaatgtattctaagagaaattctgacccatcacaaactcataattctagtgtccaaagccatgctcaaatgaggtcataggatttaagttcccagaactagacttaaaacaatatcatttatgcaaggatgttttatattcaaagtgctatactcaaattctttttaaactgaccaagctgattttgtcttacttaaccttgttactacttggtcaaatctccaccactgaaatattatgtaagtaaagatccagcattaggaaagtctgcttttcactatatagtacttctaattaacattttctttctgtcctcattaactgctgccatacttatttagttgaccacatcagtgtctactatgcacaataccatttataagccatttgggggaaggaaagaaaggcaagtgcatttaaatttccatttctgtttatctttaaagctaaacagtggccttcaagaaaatttttagctgtatccagttctgcaggcatgtatatttagttcctgataatatgatagttaatgcaaagaagcttttcttgtttctggtccttagatggcctctagttatgcctctccaatgaataaaatatcttaacttgtgggttttaagtgctggtaaaaaaaaaatttaagtgacacattgatcagaataagaaacattcttagaaagaagaaagatttggataccatctgtgtactggtaataataaagcccacataagctttcttggtaaggtgaggatcaaagagaagtaggagaaagcatagttgagcaccccaaaaatagccattaatgggaaaagagggcagaaagaacctgaaaaagagacacaaaatgagtattttgaaaggtctgagaaggaagaaattatggtgtcattgaagttaagcggaaaagggtagcaaggaagaaaggaaagctgatgaagtaaactgcagtagaaaggaacactaaggtaaagctagaaaaggggctgtgaatttatatagaaggaattcattgatgaccctattgagaatagtagtggtagagtaaaattatgaaagtaaaattgcaaaacattaagttgggagtggtggtgggggacagggggcgggaatagaagtagttgttttaaactagacaatcagcaaattgagatttcataggaagaaaaaaggatttgaaaatagctggaaaaattgtagcgtcaagaacaattttctgcaaaaatagaagggctctgataatgattacaagttatattcaggtataccctgttttattgcacttcattttattaagctttgcagatattatgttttttatgaattgaagctttgtggcaaccctgcatcgagtaagtctatcagggccatttttccaacagcatgtgctcacttttctctgtatcacattttggtaactgtcacaatacttcaaacttttttattatcattatgtctgttatggtgatctgtgatcagtgatctttgatatcattattgtaattgttttgggacaccatggaccgcgcctacataaagtggcaaacttaattgataaatgtcgtgtgtgtttttactgctccaccaactggccattctcctatttctctccccctccttggacttctctgttccttgagacacaataatattgaaattatgccaattaataaccctacaatggcctctaagcattcaagtgaaaggaagagttatatgtctgtcactttaaatcaaaagctagaaatgattaagcttaatgaggaaggcatttcaaaagcccagatagattgaaagctaggcctcttgtaccagttagccaagatgtgaatgcaaaggaaaagttcttgaaataaatttaaaaagtactaatccagtgaacacacaaatgataagaatgtgaaacagccttattgctgataagaagaaagtttgagtggtctggatagaaaatcaaaccaaccacaaccttcccttaccaaagcctaatcaagagcaatacctgaactctcttcaattctgtgaatgttgagagaggtgaagaagctgtagaagaaacacctgaacctagaaaaggttagttcatgagatttaaggaaagaagccatctctataacataaaagtgcaagatgaagtagcaagtgctgatgtggaagctatagcaaattatccagataaagctaacattactgatacaggatgctacaataaacaatacattttccatgtagataaaacagccttctattgaaaaacgatgccatctaggacttccatagctaaagagaagaggtcaactcctggcttcaaaacttcaaagtacaagatgactcttgttatggactaacacagttggtgattttatgtcagagccaatgctcacttaccattcagcaaatcgtggggcccttaagaatcatgctgaatatactgcatctgtgctctataaatggaacaacagtctggatgtcagctcaagtctttacagcatggttcactgaacattttaagcccactattgagacccactgcttagagaaaaagattcctttcaaaatattactgctcgttgacaatccaccttgtcacccaagaactcaatggagatgtataaggagattaatgttgtcttcgtgcctgctaacacaacattcattctgctgctcatggatctaggagtaatttcaaatttcaagtcattatttaagaaatacattttgtaaggctacagctgtcatagatggtgattcttctgatgaatccggggaaaataaatttaaaatctccgtaaaggatcaaccattctagacgccattaagaacattggtgatctggctgggcatggtggctcatgcctgtaatcccagcactttgagaggctgaggcgggtggatcacgaggtcaggagatcaagaccatcctggccaacatggtgaaactccatctctactaaaatacaaaaatttagtcaggcatggtggtgtgtgcctgtagtcccagctactcaggaggctgaggcagggaaatcacttgaacccaggaggcaaaggttgcagtgagccgagattgcagcactgcactccagcctggtgacagagcaagactccatctcaaaaaaaaaataataaataaataaacattggtgattcatgggaggagttcaaaataaatatcaatattagcatgagttttagaaaaagttgatccaatcctcattaatgactttgaggtggttaagacttcagtggaggaagtaacggcagatgtggtggaaatagcaagagaactggaataaaatgtggagcctgaagatgtgactgaattgctgcaatctcatgataaaacttgaacagatgaagagttgcttcatgcagacgagcaaagaaagtggtttcctgagatagtatctactcctagtgaagatactgtgaatattgttgaaatgacaacaaaagatttagaatatcacataaacttagtttataaagtagcagcagggtttgagaggattgactccaattttgaaagaagttctactggaggtaaaatgctatcaaactgcttcacaagacacagagaaatctttaatgaaaagaagagtcaattgatgctgcaaactttgtcttatttgaagaaattgccacagccaccctaatcttcagcactatcactgtcatcatcagcagtcatgtacactgaggcaagaccctctaccagcaaaacaattatgacttgctgaaggctcagatgattgttagcagttttaagcaataaagcatttttttctgagttgtggtctctgttgcccaggatggagtgcagtggggcaatcatagctcatggcagcctcagattcctgggctcaagtgatcctcccacatcagcctcctgagtagtttaaactacagaagcataccaccatgcccaggtaattttttttccttccttttttttttttttttttaagagaggaggtctcactattgctcaagctggtgttgcactactagcctcaagagatcctcccgccacagcctcctgagtagctgagattactgatgtgaaccactacactcagcaagtattttaaaattaagacatatatatctatatatttataccttaatttatatttatagagagagagagatagagatagagatagagagacataattctattgcacacttaatagacacagtataatgtaaacataacttttatatgcactgggaaaccaaaaactagtgtgactcactttattttggtggtctggaaaaaaacccacaacacctccaaggtatgcctgtataaaggcagagagaaattgataatacccataaggaaagggaaatgcaatgtcttctcctttgaaaagtaaaatcttccatatttttagagatcttaatagagattaaagagaagaaagaaaggagataacaaaaacgaaagagggaattaacattttggctcgcttcattgttatttcttccaaactctggtttttccaagttgcttcaggttcactcagattcaacaaacatttaacaaatactctgtgccaggaattttactaggtatatatcctgaacatacatatccttacctggaagaaacattgttcataaagcaaggatacacacataaaagtgaattaaagtaacatttatgtaagtattctcggatacatgatctcatttgcctctcaaaataacctaaggagatggggagagcaggtgttatctttactacagatgaggaaactgaaaatgaaaaaaaaaaaaaacagagggatgtcaaatattgcattgttaattgaaacccaacccaagacttctgggtgaaagccagggccatctccactgaaacctaaagtctgccatggatttgactgtggatgtgccaccctcactttttctgacaacctgggccttgacttagaagacaatgataccttcaccaacttcattttctgagcttctcgtcagatgtcgtgggatgatgcatatctgttacattccccaaggacagagtgatgtgtggccatgataactttatgcaaattatagccaagcagctcagagttgagaaaccttaaagacaaaaggtgaggaggagaagagggagcagaatattccttttttcaaaacttcagaagatgatgatccagaaactaatagtactacatatttactttcccatctctgttgccagctttgacctgcttataaaggagaaacagagatcacttttgctcttatctgatttgttcgaattgatgctgattacttttgtcttgattgtaatgcactttttctgcatctaggctcattttgagcatttgtcataacatatctttatgatggatttgtcactactttcctcattgttccatatctataatacagattctaactattgatagggcatttttcttttggttcattagcctaggaatgaactaggtagttccagtaattaaaaaagggaaatcactttgcgtgtatcccataaaatatgaaaattgttattaaattatgaaaaaatattagaactgcagttatacacttaaacacttttctgcttattaaggtagttattatagttcctgtattcatcttttacatacagtcatttacttgttttcatgctatttctgtgatgtaggaaggttaaatataattctcattaatatatttttttaaagtgagctatgaagagtaacatgttgatggccacgctatcagaggaagacatttccactaagatgcccagaatgaagagagggaaaaaaaaagtccttcggactctatattccatactttgtgcattataaaaaaattaaaatgaactgatattattatattaatctgaatttttataagtaaaaagtttcttcaaaaaaactgaataaaatcgtatcacaaaaaagttaataatagataatattacttaagataacagcttgaattcggtctttccctggcaaaacttcttttcccatgttatattctcctatgcctctcccatctcaccaccatgtcctcccaacattccagcacttgtttcagtgtttagaacactgtagccccttggtaaattcactatttgactctacatatttatatttctgccatcttttatttacttcttactaatttgagggtttatgaaaagttgattttcataaacttgcatttagtgggcttttcaacactagaccagaaatattatgcaatacttatttttacccaaatcatctagaaatcttaagccactgaaggaagtaatccatatgacctcattatggatttgattctattcaaactgagttctatacagtggaaattgtatgcaagaagaagtaaatatcgcctcatccaaccccttcagtttaaatatgaggaaacaaaggtccagataggctaactgccctcctcaaaaccattcagttagcaccagactcaattcaacatgttgtttcttgactcctaccagtctaatgttttcttttttccattctgcaaaagctgaatcttcaatatgcagtgtttttttcttaagctaagttacatcttttaggaaataaaaaagttcctaaaactcaatatactaaaagtatagggtttatctcatctttgcacttagtgttactaagttcagagtgttgctatatgatgatgtcaataatgatactagattatagggtcaatttcctaatcatagtctgcatacgcccaggcccacctgtaaattttaaaatcatgagcctgatggaacttgaaatgtatctcaatatgtaagggtgaatttatcatcactactcgggaagaaaaggtaagacattgcctactgagagtgccaccaatttttacacaaaagtcagcaacatagaaagatagaatctcacagaaaaaagaagccgtgcattgtttatgtctggaaattatgtagattattggagatgttaaattaacttgatattttcccccaattaagtataaagcatagatatggtggactattaaaaaatgtttatgatatatttaccaaaactaggacatggggtaacagagacagcctataagaattggtgaagaacatcttatggcctagaataggatagaagatatgaggaaagaaatgaagagcattgtttcaacattgtctcctgaacagagtaaacttcaattaatattatttgaacaagattaatttaataccatcatagagtcttaaataccacataatgcaatcttcaacactatgaaaaataatgatgtatattataagaggtctgtatatccaaataatttcagaatataaagatgtggcaaatgtgaaatttctgtaaatatatgcaaacacatatatctaaatatatgcaaacacataaatatatctctaccaactccctaaatcccactgataatgatagcaaaatataaaaatgagagtagatcaggaattacattagaaaacattaaaaagtattatcatcagatttgctgaattttcaaagatataacacatatggaatataattgacagcaaaatctgaaagtgctgaagaaccagaggtaaaacagaataaaaccgttaattttcccacagaatactaaactacaaattatcaaaaaacatcttctctatttaaaaaaatgtggggcttaacacccaggtgataggttgataggtgcagcaaaccaccaccacacacatttacctacagaaaaaccctacacatcctgcacatgtatcctggaacttaaaatagaattaaattttttaaataaaatttactgtgagagattagcaatgagaatttttgcacattagaaatattacgatcataatttagcaaaaagtaaaaattttattttgggtacaaggacagatatccttttggtgagtttttcaccattgggaagattgcattagatgttataaataagggttaacaaacaaagaaggttttctagagagatgaatttggtttaatgtagaaataaacttgaaaataaaagtgtcctattttcactgttaataataaatacattcaaatatgttcaacgtataacaatagatttataaaagaaatgagcaccctgcagcattaaaaatagtattcaggccaggtgaggtggctaatgccgctttgggaggcaaaggacggaggattgcttgaggccaggaattcaaaaccagcctgagcaacatagcaaggctccacctctacaaaagaaaaaataaaaaatctgctgggcatggtgatgcatgcctgtagtactagttacttgggaggctgaggcaggaggattgcttgagcccagaagttagaggctgcagctacctgtgatcatgagactgcattccagcctgagtaacagagtgagaccctatctgtaaaatactataaaatataaagtaaaataatagtattcattcgttttgcactaagccttcttccaggatgtcctaatggactgtgaagcagtaaacatttagacttgcacaagcactcttccctctatctggttctctaattctcttactttttctaggtttggatttaattctttattcactttttcatttgaacactacatatattaagtttggggaatccattctttctcttctttaggtcttcgtatgaagaaccatacttagttccaattacaggcatgtctcagagggcaaaagcatggattatttatgccttatttggagaagaaagtaggcattgtatgactatcagcagcaatttttcaataagaatattcttgatattttagaaatgaagctttcagaagagtctccaggtttcactaacttgttacttccttattaaaacacagttttaaaatgtctgccattgtattaaatatcatggacattgatatttcaaatatgcaaatgtagtttgggatctcatttgtactgtgtatcttcagcacgtagctctaagtcctcttacaatttacaaaaatcagatgatcatatactttatactgttaaatagattgaaagctttcaacttgattccttaggaaattattctccctcttactacaagactcaatagaggaggtgagaaaaaaaaggaagctttattgatggtctttaattcatatctgcaggttccaggctcacttttgatgatagtcttttataattgaagtagaacaaaagctatagtctattcaggaggcctatatatacattgaggaagagtttactaaatttttactacctctttcaaataattctcactgtactttaaattaattttctcttgtaaaaagatacattttgaaaaataaataagtaccacgtagctcatatttcagggtcatactactgaaaccaacattagattgtgtttccagtgatagtgaaggatttgcattacctaccccatgctttgtcagagcataacttgtaacatgtaaaaatcacctagattggataaggctacgatcagtgattacgcaataaagtgaggactgtagaggaattaaaatcttatgttttttatctcattttcaaaacatttattttctaaccaacaaaagtatatgtagatatatatacttatatatatttaaaactatatgtagatatatatactatattatatatatttctatatatatatatatatccatatagatatagacatagatatttgaccacaaatggaatgaactgtttgcctcttaccaactgaaatagtgaatttagctccaaatcatgcagggtcattttttttccagttccaaattgtgtatgccaagactctccagtactgaaaactgttaccaattcctttccatcaccctaactggagtcttctcaacactatctgacattaataagggagacaggaaagcacctgaaacaatagactatcactgctgccaaattccccatccattttacaaatggaacaacgaaagattgaggctgtgcagttattctctcatatagcgaagttgaggcaatgcaaatctactttcactgacactgactgtgtccatgagacaaacatcaggccttctcaggacacaggaggatctcaggcactcaggcattgacacacatctgggatcctgccctctacccccatgtattataaatcaataaaatcagattttactaagaggagctaaagtaaaacacaactgatggatatttttgttatgttttgtttttaatgtctttgaatttgtgactctaatttaggtcaagaaacttcttttacttagattacttaaaatataatgaaacctttttatcagcttcattgtacttctttccagaaaaagaaatcaaatgtctacatgagcttcttctaagctggaaccaaggcatctggtcccagttaatttgacagctaccacacagttatatgtatatatgtgtgtatgtgtgtgtgtgtgtgtgtatatacatgtatatatatttgtatatatatacatgtatatatacacacacacatatatcatatatgtgtcatatgctatatatcacatatatatgattgtatttactagaagactcgaaacgatgttgttttctattattaaaaataataaccgatttttatttttccctcattttgatgtttatttgatatttgagtacattaaatttcatgtgcagttaattctactgctacattatgtttttaagggctacttattgatccctgcatgatttagacagtattcagaataaaattttttaatgtattcaacgaacagaccacatcctatagctagctcataaattaatatcattggtcacaaaggaaaatggtcaagggaatgtgaatatctcagtaacactgatatttattactggggaaacagtcttggactcagggcatacagatgtagatcagttgtgtcattgcttgtattcaaaggccaccatagtattagttgacagtctgtaaagtttagctgtacttaaaaaccaatcttgctaatgttaatataggcctggatatgtgtagcatattactatctaggaatctcttattcttacattctacctgcaaaactaagaggcaggggtcgttgccattcatcctattttttaggagcgattcactatgactaaaatttattgtatcatttagagaaaaagtttctgaaatgcagaaagtagaacaaatttgggtgttctatctttgagttcatacaattagtccagaaactggatcttaaatagcacaaggcaattttcatagtttaaagagagaagactgtaaatctggtttatcatgttcttatcattctttcggaaacatgtgaggaaatgtgaggaccactgtgaatcgaacaataatcataaaattaggaacaaaagaaacagacagaacaaagcctttttttctctttttttccttttcttttttaggattctaaatcacatacaaaacatttgttctgctccagctctttgtgaactaattggctctcctggagggataggtaattgtacctgactacacaagctgtcccgaagctcccttggaaagctccagtaagcttctagtgttagcagccatcaaggatttcacaggtcaggcatcggatcgatacagctaaaagcagcagggactgtaatgtcgacagcaggtttcagaaagcgctgcaagtgccagtttgttcctcttcatgcagaagctcaagacagcttaattaacccttggaaaatacaatttatccagaggctcggcaggtccctaccaggccttattggtgaactgataggagagatactgtagctggcagcgctgaattcccatttccccctttaatgctgtttcagttaggatgcaaagaaaacatagttttcggtggatgtgttcctcatgtcctgaagagcaggcaataggaggtagccttagaggggggtttgttagaactcacttgtgacttcagcaggagcaaggctgagactgagcattgatcatccgagccctggggtgagaaattgggatgtgtgtgcatgggtgtgtgtgtgtgtgaattagatgtgtgagagagaggtgtgtgtgttgtggggcggggggaggtgtgtgacgggggctggggggagaaaagcaaaggcatttttctctttttcactgatataaatgcttccgtgcccctgtgtaaaggtgttctttaattggttgtctgtttgtcatgtctctaatatcatacaaccaaaaagagtgcagatctgaatatatttttacatacttcatgttggaagacaaaacacctgccagagataacaatcagggagaagttaatttgtcacatgttatactccaaccctcacctccagtgttgctcaacacatcatcagtcttttctcctaatacagttcttccacactaaggcaaactgctgaagagacataaataaagctagcaagatacagaaaatatttgaagttagtggggcttgagaaattgtggccacatgaatggtctggtgcattcacttaaattgattgtatctacttgtatttgcattcacattcacattagcaacatttttaatgtgtatcatttcaattaattcatttacaagtattttcctaggttcatatctatggtcatgagtgagggttcatggcgttcaggttccagaacagtgaactcccacacacatactgggtggatagatgccatctcctttctgctggctcatttccatttatgatcagaagcaaagtagattaaagcggaagaaatgaaattaaatacagattagatgtgcaaactatggtggcatattttagaccaggatccagccataatctcttcaaaataatttataacaagtgtaacagggtaaaaacaaacataacagatgggaagggccctgccctcctccattatcaccagtctctcttccgagaggagcaacatgtaaccatttctgttaccagctcttccactgggtagcatgcatttattcaacaaatatgtactgaacagttactgtgtgccaggcaatgttttagaccctggtgatatggaaatggtaaaaatagacacaaggacgtcatcaaagagtttacttccttatgtgaatagacaaaagacaaacaaacaaaaatacatatgtattaatatctcaggaagtaactataaagaaacattaagtaaggtaagaatacaaagagctggatttctatcattatcattagcatagccaggatggtttctctaaaaaggtgacatatgaagaaaatcggaaagagaagagtgatgcttcatgcagttatctgtccagggaaggaggaagagctgtccaggcagaagcagcctatgcaaactccctgagatgagagcatgcttggcctgaccacaggagagcaagagaactttgtgattgaaaaaagcgagaacaggatgatgagacaagacaataagtcacagatatagtaagataaaatatatataatgtaagcccttataggcattgacaagtcacacagctaggaaatgtagatttgggttttaaacacaagactaactgcatgctactaaccaccatgctatactgatccttgaaaacaaggccttgtttcacataggatttgtggtcatctatgctgtctcccactgtacccacccccccccccacttattactctgattaatcaatagttgactataattccaatttaactgacttattaactgaccagcaaggatagctttatatctacttggacacagacatcaatactttccagttgtacatagagagcactgatagaggctcagtcaagaatatgtgtgggctgggggcagtggctcacgcctctaatcccagcagtttgggaggctgagacaggaggactgcttgagcccagaagttggagacacagcctggcaacatggtgaaaccctgtctctacaaaatagacaaaaattagctgggcacggtggcaaatgcctgtagtcccagctgcttgggaggctgaagtgggaggatcgtttgagcccaagaggttcaggctatactaagccgtgattgcgccactgcactccaacctgggcaacagagtgagacttgtctctaaaacaaacaaacaaacaaacaaaaacagtattttgtatgtcttccaataacatttccaaaaggctgagtacatatccagtccttgattagtgagactagaaaggacttcagaggttaattagtcaaccctcttcatcctacagataaggaaaggaagacccagaatggttaatattttccttttcaaattcagaaaagaaaaataaactcccagagagacaattcgtgggctaggaactatgatcaacctcagggtccagcagacccctttttaccttttcttctttttctgaccaactctgccccaatcctgtcctcccaacctctatttctttttttttgttttttaactcttattttaggttcggggtacatatgcaagtttgttatataggtaaactgtacgtcacagaagtttggtgtagagattaattagtcacctaggtaataagcatagtatttgatcggtagtttttcgatcctctccctcctccctccctccatcctcaagtaggcccctgtgtctcttgtttccttcttcgagtccatgtgtactcagtgtttagctccaatctataaatgagaacatgcagtatttccggtctctatgtctgatatcatcttattcaagtttatgaatttttaaaatttcttatggcagaaatgtaagaaaaagatggataaataaaattcctaaacctaatttttcattttactgtcatccttttcttcttcaaagtatttcactggaggagctagcaaacaagaggataatttacacctataaattgcactttatttctaagcctttgtgctgtgaagttcaacaaaatggtggaaaatcgatttgggaggggatgagggataagaggcagcatgggacaaaaagcgtggcaccaactcaccagtaacggccagcttgccaagggatttgaacaagtcacttacccctgctaaaccttacttcctcttctgcaaattgagaatttgaatagataatctcaaagtcccaggcagcactagaggttttagagtcatgccatcaaaggagtagcacctagatgtcacagctagttccccaaagctagataccagtcctctactgttatttctgtacattttatatagccaccattcaaactgtagcatgcactcctaattagcattttattaaagctcagctcatgtgtctgtagtctgtttttcaagatgacttaaaagaaatcagaatttgtgtgctattcattccctctcaaaagcatattttcaagatgtatttaggcaatagtacttttccaaagcataattgtatcctaatgtaaaaactgcaaatatatttcttttaccatgttcggcaaatccttaaatgacctcatattttagcattattatataatacgcaaaggaagatacatcttatgtgaacttatacacataaataggatttttaaaaaaaattcttgacacattaccgtatgctgcatgctttttgtggattatgaaagaataaaagactaatatactaactgaagtttgagaatttctgaacatcatctgaatttctatagcatccactccatttaatcacacattcacgtatcagtcccagtaacagtgtcttcaaagtatttacacattgactgactttgaataagcatttttatagtttctttttataaccaatcaatagtaatgtctgcatcacaaagataagtgaatacaagatttgttgactgatgttgcatatttacattacagttattgcaatgtttttatgatcaaattggatataagaggatttgcaaatacacctgtttgtttaatgacattcccagtatagtctttagtgctccaggaaccatttaaactgtcatgttaccatctaaaatagccgcctctatctttcttcagtttttacttggcttcatttttcttcctaagcttactactatctgaaattatgctataaatatatgattgagcctcaaacaaagatgagggttagggagctagccccttcccctctcccccaacacagctgaaaatccacatataccttttgactcccccaaaacttagaaactaatagcttactgttgactggaagcgtaactgataacataagcagtcaactaaaatagatttcatatgttatatgtattataaactgtattcttataataaagtaagctagagaaaagaaaaatattattaagaaaatcaaaaggtagagaaaatatatttactattcgttcagcgaacatggatcatcataaaggtcttcatcctcatcatcttcaggttaagtagactgaagaggagtaggaagaggaggagttggtcttgctgtctcaagagtggtggaggtggaagggatggaggaggtagaagggagacaggaaaggcaggcacactcacagcaatttgtattgaaaaaaaatccatgtataaatggactcatgcagtgcaaaactgtgttgttcaagagccaaatgtatgttcatactcgttaactgtcactataggccaggcgcggtggctcacacctgtaaatcccagcactgtgggaggccaaggtgggcggatcacctgaggtcaggagttgggagaccagcctggccaatatggtgaaacccagtctctactaaaaatacaaaaattagcctgttgtggtggcacgcacctgtaggcccagctacttgagaggctgaggcagaaggatcacctgagaggtgaaggttgcagtgagtcaatattgcaccactgcactccagcctgggtgacagaatgagaatccatctcaaaaaaaaaaaaaaaaaaaaaaaaaaaaactgtcactataatgtgaggtgttacatgaaggtaaaagcttgactgtctaatcactatatcaccagcacttacaaaagcattaatcacatagtagatgcaaaatacatatttgttgaatacataaataaactttggatcatttatatgtgattgtaaacagatgcacctaacattaagttggtgcataatgcacacactcaataataggtatatactgtattatttaacattaggataccttgaaaactgatcatcatcatacaatgaaataaacaaacaaatattagattgggtatttacaaagtcatcttaaaaagccggaagacctccacagctaagggtgagtcctggagatatttttctgttcaggctctttcaaaaaatagtttcatgggaaaatagctaaatctgttataataacacattcaagaaaaacaatgtatcaggtaaacaggaatagaaggcagtagaagtgtagaatgggaaccagaaatttgaaagttggcaatgtgccagtcaataatgtataggaaccagagtaactgcagcactggagaagtaagacaaggctgcttcatcaagcctcacttattaccatcagtctcaactctgattctgatcatacaaagcagtcttttgattatgaatttgcttctcaggtttcttgataagggggagggagctttccctacttagtgaatacttccattattttatctagaaagggtatctctcattaaaaattaataaactgtatttctgatttagacatgacctttattagactaacttcatccatgagaggctacctcacgttcagcttatgacaacatccatttcatgagattccgaggctgagtccagaccccgaactgaggtgatccaatatagaggccctgtcagcattgtgaccagccagacttcattggtcatacccttatatagcatatatgaatggattcattaatttccttgatgaaaagtacatttacatatatgtattattgttatacaatcctttacacctcaccaaggcctgcaatctttcactcctttttaagtattttcaagttatctcaagttaaaataacagacatacattcagaagctttaacatcttaaacagggaacaactccagcctcacagaggatggcaaggagtgaacctgctactactccatagatgccagaagtaggcaacaagacttactacagcagagcaagacagtttattactcacactcagcaaacagaaaatgtgtcatcattgtactgccttgtacatgttccccttgcctcccaaggcccatgggcattatgatgagccaaatggatgatttgcgcacagtgggttgggttgcagctgaggaatacaggatcaagggcaagcagcaaacaagctagtagtcacactgtggtcactttgaccaacttagcttccctacatgaccagctacataatttgttcagtatcatgagacaggtaaaagggaagtaagtatataggtaataagctgttatgtttttgtttttgagtttacaacccctaaggactgccttccagtttggttcacttagcatatgtccagttccaaaataaaaattttatcctataaagaatatttttatctatggttcttccatggcgacaactcacaaggaattttagaagttgcttactccattatctaatcaaataattacagaaagtattaaatatatgtacaaacgcttttcagaaaaaaaataaggcaaataaatgaaggttgaataattctggaaacttaaagtaaaaacagatacaaaatattaaaataagaataacagttatgaatcctctagaattatttttaagagagttactagtttatggaagttttttagggacaaaaatcttccaagaaactatggaaatattcaatgtatattgactaataaaaagtgacccaaaagattcattcacgaaccttttacttatcccagtagaatggttagtagtgaaccagacagtagtgaaggtctagagagaaggatcagcatgtgatcagcaggagagagtctagtagaaacgttcggtttgagaggaattatttaagtgtctatatttggaattcagagaaaatatgtggaaatttttacatattcatcctagataattaagttatatcctcaatttgttcactgatataaatgtattatcaaactaacgcaagaacagaaaaccaaacaccgcatgttctcactcctaagcgggagttaaacaatgagaacacatggacacagagaggggaacatcacacactggggcctgtcggcgggtgcggggctaggggagggatagcattaggagaaatacctaatgtagatgacgggttgatgggtgcagcaaaccaccatggtacatgtatacctatgtaacaaacatgcacattctgcacatgtaccccagaacttaaagtataataataataataataagatagataatctcatgtagtttgtgtggttttttttttaacacatcagaaggttaagccaacaatttccatgggtggtttttaacattcagtactaatttaatcacacttggggggaaaaagctatttttctttctcaatctcagcttctaaagcttttcaataaatcaagaaaataaaaatataagaaaacaaaaatcttgcgtgaggcagttgatacaatacaaaggtaactgacctacgttctagtgttttactctaccaatgctaaggttagagcacttaagcaattatccttcctggaccttaagaacttatctatataagaaggagacgtgggatagatgatttgtatagttattttctgctccttaatcagcttttcattaaacaaataaaaatatttgaaggatcaggactaagaatttgaccaggaataaattaaaagggaattagaaaaaaatctacatattctgattgtttcaccacagggagcaagacgtttcttcattcaaggctgagccagaaaacaacaaatacaaaacttagaattaacaaaaaagaaggggaaaagtgtcccagtatgtaaaagaacattatctctatacaagtagggcctgccatactgagataagttatacatgagataaaattaaataataaacaaagattaaaacaagaagagaaaaaatattataggaagcaattgccccaaaataaaactgcggtagctaaatctcagaagcaccagaaaagccaacctgaaactgcaaaaaaattaaattatcagtgtgtagaacaaacataaaaaaattacctttagtatgctgaagaaaaagataaagtaatgtaaatcacgaaagaaagaaaactacggaaaaagaataaacatatgaactataaataataagaataagaggaaatccaaagttaagtaatcaaggtgcagaaaaaagcatctctctcatccaagaaaatgtttaacctagacatggaggaggctcactatgacttaggaaaaaaatagatacttatcaaaacatattctaatgaaatgcttgattctttagtgtaaggctagactcatatcagaggaacaacaactaaattggtctcagaatgctagaagaaaataaacatttgtagtaccttgaaagaaaacagttatgactcaaggatttttatacccaagcaagctgttgttattacgtgaatgccattttaagattatcgatgttatcagagaatataccatttcgtactttttcacacacggaaaaataaaaatttgctccatgttaccacgagataaatcaaaactaaaaactgaataatgagaaagaaattggagatttgactggcagtgagtattgatattagttaaaaatctagagataagcccaaagcaatgttgttctgttacgaaaacatcaaattcatggaatgttaaaaaatattctaggacaaattgactccatagtcaaacaattttgagaaagtttgcataatgcaacttcctgaagacaagccacaatatttatgattatattaatctctctttaaaatctctcttaaaataaagatgtcaatataattgtgcttacctcaggcaagcctcattgccaggtttcccttaccattaaagattttcttttttcaaaacacttattaatgtattataaaatagagtgtttgggggcagtcacagatggggaaatgctagcctaaataattgtgataaatggacctaaaaagaaaacataagagacaaaaattataaagcaatacttgttaaaaagaaaaagaggggatcaacatgacaaagatgaagatgacaaagatgggatggataatgtattgggaactaataaagtagacaaagcaacatatacaattttcatcttccatttgaagaaatcaagtttttttttgaattgcaagaaaataaatatgtttaaaaatggttttggaaatcaaacactgaaaaatttaaatgcatttgcctaactgcagatcaaggagaaaatacattataaatttagttattttttatttacacttttaatttaaaaaaataacaatttagaagaataataaaattaggaatatttatatatctaagtttttggagtaaaactaaagctgcatcaaaagtaaattcacatcttatatacaacttttattaaacaaagagaatcaaaaattaaatgaattaaactttatttcaagaatttagaaacaatacttcaagaagttctaaggaaatgaacagaaaggaaatactaaatatcaaatcaaaaataaatgaaatctaaaacagaaaaactgaggaaatcgcagaaacaaaagccttgagctgatttcttgtattgcggtcagctgaggctatgcttaagcagcttaagaaatctctcctcttattctgcctttggagcacccttgctttgatttggtagccccattgtccaccttatagcttcaaacatgttttctgtccatatgccgaggtctttcagcttcgctataaaagaattccattgaccccttggtatggacgtgtttcagtttcagtttcccccccgtaacctatttttttcatataatgctatattctaccctttgtagctaaggtccagaatcttaggtttgagtatgggagggaagatggagtattacaaatgacaaagggcatataaaatgtatatatatatttatatttatatacacagaatgtatatcttttataatgtaatatttatgatgtaaacatataatcatatattttaaatcataaataatataacattattaatatttatatttacatatatatacacatatatattcacattccactaaaaaaagttcattatatgagactattgtatgttttccccaagtcagaattttctgaaatggacattttctgtaaaaatataagccattattacatagtaacaaagaagtaacaaggtaaatcagaaattaaaaataaaaacaaatgtaaaagaattgtctatttaaaaagatcttggcttgaattctttgtggattttttttatcttcatgaaacagatccttcttttaatatatatttttcttagcacatagagaaaatacaaagaaaacaaaaatctagcatagagaaaatataaagaaaacattaattttgaaagcagtcaatgataaaaggatattggagaaaacctcacataaacatatatgcaagagtactttaaaacattagcaaatataatttcaaactttaatttaaaattaaattcaactttaattacaattgtcttacataataatatcattaaaatttattataaagcaaaataaatctatgtaaacccattactaaattttaacaaatgtcaactcatgaccaatcttgtttcctctataattctactctcttctcccttctactaccattgctagattacattaaaaccagtctcagacattgttacattttatctttaaatatttcataagactcttaattgataggattttttttccttttttgtttttcttgctatttatttgttaaagagactatagagcttttcacactctggactctgctggttgcatctctgtagtattatttacatgttgctctattccatgtatttcttataaactggtggtaaggtagacagtcttagcattggggtgcccagtttcaataattcactagaactcacaggactcaacatatagccatactcatggccatcatttattacagagaaataatacaaagaaaaatcagcaaagggaaaaggtatgtgggacaaaatccagaggaaatcaggtgcaaacttgcaagagccctctcctagtgggataacatagtactcacttagcagtaaatgacagcacatgtaaaatgttgtataccattgaggattgtcatggaggcaccctctgcctggtatatacaattcaagacttccataaagaaagcagggttcaccataaaccacattgcttgtttaaacagtttaagtacagtaagtattcttagtaggtaatgatggtaactcccttgaaattcagcttccagacaccagtcaaggatcaacccatcttgcaagcagggctttctctaaggataagatgtctcaggactgctaacttttttccacacagtcttaattttatttatctatttatgtatttatttatttattttgaaagagtactttgtaggtaaaatattcctctgggaggctcacaattcctgcttatatctatttttgtgatgatagtatccatttataattaatgcctatatccatttatttcatttagggttgaaaatttatgatattatattattttttcacttattagttggaatacttacataaaaagaaggcaatttaataaaataaaaaatacaggaaagtctgctttacataggaaaggtaaaaacaaaaatgcttcaactcattccttagcaatctcaaaggtaattggtaagatttttaaaaattattattatgtattcatgtatttaaacatatttcatgtatccaactcattacagttaacctaattactgtacctaattacattgaattgtctttggccaataagagcttcttcaggttggctctggggacctgttgaccactgtagttttttacagcatccttgctttatggcttgacacagtattccagtttatcatgcatattttctgcctcagaccttggtttgttttactgggaaatggtacttagaggccacaatatggcaattgtgggtgttcattactatcaagtttggcattgtttctaggcttttcagtagataaatctatgaaacatgttttttgtttgtttgtttgtttcatcagaaaatatattatgacataatattgatatttctaactccaatgtataatttcagactcaacttccttaatttttaaaaatctacacctctcttaccaaaagttttaattcctaataacattaatgtgtttatttgctttatcttactatacacatgcaacagttacacgataataccactaacagtagattaccagaaacagtttatttttttctgcattattttggtctttagcatataacccattaagaaagtttagccagtttactatattttaaaatctcttggagtgattagtttctgggagattacgccatgaattcaatacagaatagattcatttgtctcattttaattttgtttttaactgtttgtattctttgtcttaatttttaatatttatgtaaaacgcatccatgattaaaaagtcaaatctataaagaaacgaaacatataaatttgtttatcttaaatatttatgttctttatttcttcttttggccctatagataatcattcattgttgtctacaacatgcttttccttttcacttaaaaacctatactaagaattattccatatgtatgtataaaaatattcctcgtttctttttacagctacatatttccattgtgtacaatagttcaatcaatcttccattgatgagcatttgggttctttctagtctttgctgttataaatggttctctagtgagtagtcttgtgaacatgccttttcatatttttcctgaatatctttggaatagattcctagtaattagttttctgggtcaaagtgtaaatgcttatgagttttgttagacattgccaaattttcttccatagggattgtaccattttgtattatcaccagcaatatataagagtgcctatttcctcacagccttgccaacagttgtcaaacttttggatttttgccaacctgataggggagaagtaataactcagtgtaattttaattggcgtttctcttacggataaatttgaacatattttcctatttttaagggccaagcaaatgcaagtacaaaatatataaaaagtatgatctcttattaacaagtaaatttattccaactaaacaagagtgttgactaataagaaacagattataatacataagtgtatcaaatttaaatatgtttactcaaaatagtctaaaaagcatttgccaacatgtcattcaatacccatgcctttggattttttcactttaaaatctgaatttctatataacgaattctttttatatatttacctctcttgccgccttacctctcaataagatgaaaggaaaagagctacaaaataataattatctagcagcactgtcaaactatgaagtgggccatcaaagcagcagtaaattttaggattttgtggaagatatgatgaaactatgattaaaattgcaaagaagcacatcattttcaagagctaaaatttaacgataaagaaaggacaacttcctgagaggttttcacttcttgaaagatatatatatatatccccaaaagtctcagaggaacctctgcgttcaaagcagctgaggccaatatctagtggagaaaaaaaaattagttgaaaattgttcttctttaagaaagagcccattttagttctatgagggcttatatgagggagaaacacttaaacacctgaaactgtaagatgagaaggaggtagagaagccagatgccaaaaacaaactgtaaggtggaaggtgaggaggtagacatgttccagaaaatgagagtgacatgtgcaaaggctctgaggaagaagttagcttagtgtttgttgcagattaaagaatgctgggaaagataacagaaacaagttaatattttattctaagcaaaatggaaagccatataaggtttttatatttatttaaagctattgtttctgctgtgaagaaaatggatcgaaagaaaaactgataaagctttaatcataaagaaatattttataatatctttctttccaaaattgtcagatcaagtgtgaacttgacaattaaacaagatttaattgatcacaaaagtccaacagattaaaatattggtaattctaaaacaaactaacataaaatactcacacttttaaagtatatatgggatttttttataaattgtctacgtagtaagatgtatagcaaaatcccactaaattcaaaaaggcagacaggccatattctcttattacagtgcaaagaacaaaaaactaaatataaaattataaatctagtctcataaaaataggaaaaaaattcttctaaaaaattagctgaaagtatagactctttagaattcagtgaaaatttgaacatataaactgtgagataaaggcaaagccacttcagagaaaaattcataggaatatgtacttcaattattaaatagaaaacatttaaagattaaggaaacagccaactgtaaaactagaaaacatacatcaaaggaaatcaaaaagtaggcagtaaaaagaattaatgaagataaaagcagaaaataataaactgcaaaaacatactcaagataaaacagccaacccttacttgatgaataatgccatcaaacaatataaaagctatttatatatacacacagaaacttaaaaattacataataataatgaaagaattgatcatctcataggtttgagagatcaggtaggctatacaaattgataaagataatttaaacaatataagttttaagatatgttaaactttatacagcatatcataaattatagagattacatgttatttattatgtttcatgaattagctataaaattatttcatcatattttagaccatagacaacccttaacatttttaaagtaaaatttgtgaaaacgatgttctataatcacaatgaaaaaaaatatactgttaccaagaaattgataacaaagatacatttaataccaaggtattcatatcagtgactgagatgaaacacaccccaaatcaaccatgctccaaacacataaaaatgctaaacaaaatcagactgacagtaaatttcttagaagcaacagtaagtgccaaaaaacaaggatatactctatagactttttatattagttttctattgctgccttaacaaattaccacaaactttgtggtttcaaataacacaaatgtattatcttgaaatttttggctctgacccccttcctccatctctattttttaaatttcaattttattttagatttggggtggggtacacgtgcatgtttgttacaaggggatattatatgatgctaggtttggtcttctactgatcccgtcacccagactgcaaacatagcacccagtaggaagtttttcaggccttgtactcctccctccttcctttcggagtccctaccacctgtccccaaccatgtacccaagattctaagatttggctcctacttataagtgagaacatgccatatttggttttctctctctcttttttttttttacttttatttttggttcagttgggtacatgtgcagatttgttacatgggtaagttgcatgtcactggggtttgatatgcaaatgatttcttcacccagggagtgagcatagtatctgataggtattttttgaccctcaccctcctctcaccctccaccttcaggtagactccagtgtctgttgttcccgtttgtgtccacatgcaatcaacgtttagctcccacttataagtgagagcatgtggtatttggttttctgtttctgtgataagtcacttaggataatggcctccagctgcattcatattgctgcaaaggacattatttcattctttcgtggctgtgtagtattccatggtgtatatgtaccacatttctttattcagtccactgttcagcatctaggctgattctatatcttcactattgtgaatagtgttgtgatgaacatacaagtgcatgtgccttttggtagaatgatttacattcctttgagcatatatccagtaatggaattgctgggtcaagtggtagttctgttttaagttctttgagaaatctcaaaactactttccacagcggcagaactaatttacattcccaccagcagagtataagtattccctttgctctgtaacctcgcaatcatctgaatgtctgttatttcctgactttttaaataatagccattctgcaggtcaagcattttttcgtatgcttgttagccacttgtatgtcttcttttgagaagtatctcttcatgccagttactcactttttaatagggttgtttgttttttgcttataaatttaagttccttatagatttcttattgtttctggatattagatctttgtcgcattcataatttgcaaatatattcttccctactgtaggttgtctatttactttgttgaaaatttcctttgctgtgcagaagctctttagtttaattaggtcccacttgtctacttttgttttcattgcaattgcttttggagaatttgtcatgaaatatttgccaagacctatgtccacaatggtatgtgctagattgtcttccaaagtttttatagtttcaggtcttatatttaaatttttaattcctcttgagttgatttttgtatatggtgaaagaaagggaatcagtttcaatcttctgtacatggctagccagttttcccagtactgtttattgaatagagagagagtcctttccctattgtcaactttgtcaaagatcagatggttttaggagtgtggctttatctcttggttctctaacctgctccattggtctatatgtctgtttttgtaccaatatctgctgttttggttactgtagtcttgtagtataatttgaagtcaggtagtgtgatgcctctggctttgttcttttaatttaggattgctttggctatttaggattttgtttgtttgtttccaaatgaattatagaatcattttcttctaattctgtgaaaaataacattggcagtttgataggaatagtattaaatctataaattgctttgggtagtatggccattttaacaatattgattcttgctatccataagcatggaatattgtttcatttatttgtgtagtccctgagttccttcagcagtgttttgtagttatcattgtagagatctttcatatccctggttagctgtattcctgggtattttttttctttttgtggcttttgtgaatgagattgtgttttagatttggcttgcaggttggacattgttggtatacagaaatgctaccgatttttgtacattaattctgtgtcctgaaattttactgaagttgtttatgtcctaggagactttgaacagagtctatgacgttttctacatatagactgatatcatctgcaaagagagatcgtttgacttccactcttcctatttgaatgccttttatttctttttcttgcctgatggctctgtttagggcttccagtacgatgttgaataggaatggtgacaatgggcattcttgtcttgttctggttttcaggtggaatgattccagcttctgctcgttcagtatgttgctggctgtaggtttgtcagagatggctcttatcattttgagtcatgtcccttcaatgactagtttgttgagggtatttaacatgaagggtgttgaattttatctaaagccctttctgcatctattgagatgatcgtgtgacttttgtttttatttctgcttatgtgatgaatcacatgtattgatttgcatatgctgaactaagcttaagtcatagaaataaagactatttgatcatagtgaattagcttttttttctactttaagagtattgtttaataatgtatgttacaaaaaaaggacttaatgggtgaaaaaataattcattaacatacttggtgctgattccaaagcataaagaaaaataccactcagtatgaagttcgggtgattcttaaaaaattgaacatatccaaaaatttgttaataaataaccaggttacagatggacatagtcagaaacaattagaaaaaaattattacagtaattcctacaaattcacagtgtgggacataatgctttactttcgatttgcctcatagctacattctagatctcagccatgtccacttctaagccttgataacagaagacctaaaaagccagtcacttgcttaataaacattttatgaaatttaagtcattgacatcataaaattaaggcaagcagaacaatctttatgaaatttcaaacatgctgccaacttaccatcccgatctaaatcatattgattgacatattgggtgccacatcactagagacatggatcatgtgatccctcaggccaagtatctttttttttttatatattggcttacttgatttgtttccttccttccttccttctttctttctttcttcctttttctttttcagcacatgcaggtttgtttcataggtatacatgtgtcatggtggtttgctgcacctattgacctgtcctctaagttccctcccctcacccccgaccctacaacaggccctggtgtatgttgttcccctctccatgtccatgtgttctcaatcttcaactcccaattatgagttagaacaggaggtgtttggttttctgttcctgtgttagtttggtgaagatgatggcttccagtttcatctatgtccctgcaaaggatatgatctattgtttcctgactttttcttttcatagctgcatagttttccatgtggtatatgtaccatgttttctttatccagtctatcattgatgggcatttgggttggttccatgtctttcctattgtaaatagtactgcaataaacatacgtgtgcatgtgtttttgcagtagaatgatttatattcctttgggtatatacccagtaatgggattgctgggtcaaatggtatttctggttctagatccttgaggaattaccatactgtcttccacaatggtcgaagtaatttacattcccaccaacagtgtaaaagcattcctatttctccatagcctggccagcgtctattgtttcctgactttttactaatcgctgttctgactggcatgcgatggtatctcattgtggctttgatttgcatgtgaattagctttttaatgtgtgctgctaggttcaatttgatattattttgttgaggatattgcatctatgttcaccagggatattggcctgaaattttcctttttcatgtgtctctgccaggtttggtattggaatgatgttggcctcatagaattagttaaggaggagtccctcctccttgattttttggaataatttaaccccagcactagcaccctctcttctttatatatctgctaaaattcagttgtgaatatgtctggtccagggatttctctggttggtaaggtttttattactaactcaacttcagaacttgttattggtctgttcaggatttcaatttcttcctggttcaatcttggaaggttgtgtttccaggaatttattcatttattttaggtttcctggtttgtgtgcatggaggtgttcataatagtctctgagggttttttgtatttctgtaggatttgtggtaatgctccctttgtcatttctgattatgtttatttggattctctctctctttttttgttaatctagccaagagtctataaatcttattaattctttcaaagaacaaatttttggtttcattgactttttccatgaatctttgcatctcaacttcgttcagttcagctttgattttggttatttcttttctgctacctttggggttggtttgctcttatttttcaagtacctctagatgtgctgttagatcattaatttgagacctttctaacttcttgatgtaggcttttagcactataaacttttatcttaacactgctttagctgtgtcctggaggttctggtatatttatctttgttttcatgagtttcaaagaattttttttatttttgccctaatttcattctttacccaaaatcattcaagaacaggttgttaaatttccatgtaattgtatggtttttgagagaacttcttggcataaatttttacttttattgcattgtggtctgagagtgtgattagtatgattttggtttttttgaatttgttgagaattgctttatagcagagcatgtggtcaaccttggagtatgtgctgtgtgcagatgaaaaaatatatataaattctcttgttgggtggagtattttgtagatgtctctcagggtcatttggtcaaatatcaaatttcggtactgaatatctttgtaagttttctgtcctaatgatttgtccaacactgtcaatttgtgttgaaatttccactattattgtgtggttatgtgtctcttcaaggtctacagaaatttgttttatgaatctgggtgcttcagtgttgggtgcatatacatttaggattgttaagtcttcttgtttaattgaaccctttatcaatacataatgcccttctttgtcctttttgatcattgttggtttcaagtctgttttgcctaaaataagaatagcaacgcttgctttttttttcttttctgtttgcttgatagatctttctccatctcttcactttgagcctatgggtgtcattgcatatgagacatgactcttgaagacagtatacagttgggtcttgcttctttatccaacttgccactgtgtcttttaagtgaagcacttagcccacttacattcaaagttaatattgacatgttaggatttgatcctgtcattgtgttcttattaatagctagtttttatgtagatttgattgtatagttgctttataatgtcagtgggctatgtacttaagtatatttttgtggtggcagatattggtctttcatttccatgtttagcactcccttaaggacctttcataaggcagctctcccatggtaatgaattccttagtatttgctggtctgaaaaaggattccatttctctttcacttatgaagcttagtttggccagacatgtaattcctgggtggaacttctaccctgggtgggtggaatgtaggccccaaactattctggtttgtaaggtttctgctgaaaagtttgctgttaacttgacactgttccctttttatattacctaccccttctctttagctgcctttaagatttttttatttcatgttgactttggagaatctgatgattatgtgtcttagggatgagtcatcttgtgtagtatctggcaggggttccctgaattttatgatttgcatgccaacctctgtggtgagactgaggaagtttttgtggacaatattctaaaatacgttttccacattgcttgctttctctccatctctttcaggagtgccaatgagtcataagtttggtttctttacataatcccatatttcttggagattttattcaatttccagaagtttaatttggttctttttcaaaatggctatgtaatctttcagttgttaggccattttactgtggtccttggattgggtttcaaccttcttctgcatgttgatgagcttccttgccatccagattatgaactctatgtctatcatttcagccattttagtctggttaagagcaattgctggggaactagtgcagtcatttggagtaaagaaaacactctgctttttagagttatcagagttcttgcactggttccgtctcatctgtgtgggctgatgttcctttaatctttgaagtttctgtcttttggatggagctttttgcttttatgttctttgatgcccttgagggtttgactgtggtataagttggatttagtcaattggcttcattctggatgctttcaggggccaagattcagctcagcactcctgggctatgtgctgtaagcctggggagctggaaccaggcctgcagctttgctctctggcttcttcaggttaagcacctgctgcactggaggggctgaggtattcccagtttgctggcaacaacactctaatgggggctgctggcaaaagtgctctgggcggagggtggcattgagtccatgcacacacatgtgcaccggcaggagctgcagtaggtccctgcatgcaaaagcactagtgtcacttcaccaaagtgactgaagcaggctgtaggcaggtgcacaccagcaggggaaggctgcaggcaggtgcttgccagtgggggaaggctgcatgcaggtatgcaatggctgtgggaggctgcaggctggtatacattggcagggatccacctgaaaaagcactctgaaggttaggtggggtctgctgatgaaagagctacaggagtggccagtggcaagctgaggctgccctgcaagcaggtgcagcaaggcaggaaccctaggaggggctggcagatgtggagaatagaggacactcagatcagacttaccctgtcccacaagcaagacagccctgaactatccaggtctggcagccagtaaaggctacagccacctagggcattacagtgaacattggggaatgggcaccaatggccatgctccagtgcagccgttcccacaccaaaccatcaaggctccacacgggctagacttctgtctctgccaactctctagatagttctccttgacagctcagatgtctttgggtgttgtggagtctcccgcagctaggatcccagaggtccatggaccacgccacacttacttcattcaccccttccctaggagctgctcagggccagaaatgaatcctgacactgggccactctgtccagggtttccaacttcctccttttttagcccacatttgtgtcctccctctgtccactctcaacgccttctttccaaacatctgttcagagtatgctgatctacttgagggcctggtttctctcgtgggtgaagctcttcctggctgtatctagtcagccatcttggctctctctttccatctttaaagccaacaatactgcatttctttaacccttctttcatatatacgtcctctgaccatagccaggaaaggttctcagcttttaaggactcatttgattagattgggcccacctgggtaacctgggataactttcccatctcaaggtccacagccttaatcacatctgcaaagttcctttttttatgtaagataacatattcacaggtttcagagattagggcatagagatacttgggatgtcattatgctaccacaaccctgccaaactgccatataagtataaagaaaatgggagggaaaggcatagaaaaaaactaataatggattctagatcgaaagtatttgccttcctttcacattttgtgttttgggatttatttctcctgctgaaaagtttactgtcaataagagggaattagagcctgcaagggagagtgtatacaatgctgcacaaaaacatgttagaaaatcaaataaatcttggctgaaataatgattacaataaccatcatgatgaaaatttggaggattaaacacagtgatacttagtatgacaataatattaaagtcagttagaaaatagttgatgaaataattgtttgatcttttttctttgatcaatacttaatataaaattagccaatcaaagataaagtcatcaatattgatataacagctttgagggaattggataagttaggaaatggcaagatagggggacatcaaaaaagatcactggggttcccatatacttcctgcatggctgatactctaagccaggagctcacaaactttttctataaagggccacagagtaaatattaaagactttgagttttgtactgtcttcatcacaactactcaactctacaattgtggcaataaagcagccatagaaaaagtgctgatgtattgtctaaatttaatttttagagccttatattaaatatgaacatcattgttccatatgaatagtttttttaaagtgacaatcaagaacaccttgatatcacaacctaacaaaaaaaaagcaaacaacaataaaaaacactgtgcagtacaactaaatgtatcactgaaaatgagaggaaaaaaaccctcttagcaaagtgttttaagtatgttaagagaaaaatactcagtgaccaagtaggtcatttctagaatccaagagtgggaaatatgtcaatacaatttatctctggtaagagaagaaaaaccatataattgtatggataagtgctaaaaggcattgtatttttagctaactatggcacacacttttaaaagtttgataaaatgcaatcttcttactaaactaacaaagggaagatccttgtttaacataataaagatgcttaactcaacccagtatacctgacacattgaattaaatccttttaacatcaggggaaaaacatatgctcagtacattgacattgtccttgtagttccagtccatccaattagatgaggacaataatgagatatacattttgaaaagaagaaaaataaattatatatttttggttactattactgtttaccccccaaaagaaaaacaactagaaagtattaaaattattaaaagggatcattataaaataagcatttaaaattcaatagctttccttttagcaaaagcaagctggaagatataattaaataggaatgaacatttttaaaacataaaaatatatagagcatttaacaactaaaaaaaaatgttatgagggggattaaaaagtcaacattaagtcattacgcaaatttgttatattattctctgattttctgatcatttgaggcatttcataaaaaataagtctcttgctgaagtggatggatggaagatagatggatagagtgataaatagacaaatattgggtaaaacttaatttaatagttaaattttgaattatattaatatttggatttctgcaattcactaatgcaatcataaagtctaaaggttaatgaaatttttgttaagatgttcacacattgcagcaagaccttccttgtgatatatttctaatatttagagaaaaggagggtaaaactacaaatatgtaaaagatcaaaacttagaattaataaacgtaaagatttgacatatttctgtggctattttgtaaataaaacattatacacaaatctgaaattcgttaatattctcctctaattccattccttctccagtcctccccagagccaaccactcttttgacattttttggtttccttatcaaacatgttttaatactgctcctatatatatgatattatattacatccttaagttaataaagtacattcacaagaaacctacagccaacattatacttactggtgaaacactgaatgatttttccctaagatcagaaccaaaataaggatgttctgctctcaccaatcctgttcaaaatcatactgaaggtcatagcttcagtaggcaagaaggcaacaaaaagaaataaaaggcatccatattggaaaattcaaaataaaactggcactatttatgaacaataggattatcatgtagaaaatcctaaggaatccactaaaatgctgctagaactaacaagcacaaagaatgcaaagtcaatatgaaaaaaaccgtatcttatatatagtaacaatgaacaattgcaaattcaaataaaactgtatcatttacattaattagacataaatccaactaaatatggactatatgctgaaaattacaaaaccaatggtaggaaaaattaaagaatacctttagatgtccgcctttgtaacctacttaaaaagattatgttcttatacaccttgaagcataaagcagagcaagaaatggaaattttaccctgtgagtgttctacttgggagagaagcagaaagaaaacttaaaaactggattcaagaaagcagaagaatagttaacttgaatcaagtcatctctcttctatatttctttaaaaaaaaaaagaatacctacataagtagaaaaatatgccatgctcataggttgaaagacataatgttgttaagattcaatattctttaaatgtcagcttcttcaaactgatagatctaatatagattttggactcaatatagattcaatacatttccaatcaaaattccagcaagatttctttatagaaatcagcacactaattctgaaatttatatggaaagccaaggaattagaaaagtcaaaacaattttgaaaaaagaataacatttgaagacttatattacctgatatcaagactataaagccacatatatacatatatttgcaacaaaaaagacttcagaaatagacccactaatacatagttcaatcgattttttttttttttttttttgagatggagtctcactctgtctcccaggctggagtgcagtggcacgatctcaactcactgcaacctctgcctcccaggttcaagcaattctcccgcctcagcctcccaagcagctgggattacaggtgcgcaccaccacacccagctaatttttgtattattagtagagacagtgttttaccatgttggccaggctggtctcgaactcctgacctgaagtgatctgcctgccttggcctcccaaagtgctgggattacaggcataaaccatcgtgcccagcctcaattgatttttgacaattgattttgacaaaaatgcaaaactaattgttagataaaggataatattttttaaaaattgtgttggaaaaactggatatacacatgcaaaaaaatataaacttcctttcctacctcacaccatatacaaaaattaaatccaaacggatgacagacataaaagtaaaacctgaaaccagagaaaacatccataggaaaaaaaatgaaatatcaaaagcataaaatattataagaaaagttaacaaattgaactttatcaaaatcaaaaaattcttctctctgaaggtgcttataataaaacaacaaaccacaaaccaagaaaaaaatctatgcaaattatgtatctgataaaggacttgtatccagaatatataaacaactctcaaaactcagtaagaagacaaacaatccaataaaaatgggcaaaactctgaacaaatacttcacagatgaaaatatacatatggcaaatatgcacatgaaaaggtgttcaagatcattagtaattagggaaaggtaaattaaaattatgagatactactacatacctatttgaatagctttaaaaaaaaataaactgacattaccagttcctgatgtgggtgcagaaaatctagaatcctcatacattattggtgggaatgcaaattgttataacctctttggaaggtgtttggaagtttctaataaattaaacatacacgaaccatatgacccagaaattcagctcctggacacttatctacatgaaataaaaatttatgttcacacaaaaacctatatatgaatatttgtagtatatttattcaaaattgctaaaagcaatttatatgtcccttggctaggaaatgggcaaaaaagattgtggaacctccattcaataaaatactgctcaatgaaaaaagaaaagcaactcctgatacatgtaatgacatagatgaatctcagatgtgtcatgctgagtgtgagatgctacactcaaaaagctactacatatacttaaaaacttaatttacaaggcattctggaaaagtcaaaactactgagacagaaaacagatcagttgttactagggcctggggttgggaggaaagattgaccacaaagcatggcatgggaaatttgtgggagtgttggaactgttctgtatcttgattgtaatggtggtggttacacaactgtacatatctttgccaaatcttgcaggactgtataaaaaaagggtgtgtcactgtaggtaaattataattaaaagttaaaaaaaactcatttcattttcatactgtcctattcaagttttatgttttctcttccattttctctttaacattttcaaaatatttatgttaaaatctcttcacatagttttatgatttctacttcttgagatattttatcttcagcaatgagtcaagtcctatgttgtggtttaccagcaagtgtagtcagtgtgaatttgagctctgtgatggctaattttatgtgtctacatgactgagctaagatgcctagatagctaataaaacattatttctgggtgtgtctgtgagggtatttctggaagagattagcatttgaatcagtagactaagcatgaaagatccaccctaatcaatatggggaggcatcatccaatccatccagcatccaaattgaatgaaatggtattggaagggcaaagtctctttcttcttgagctggaatatccatcttattctgccctaaggcattagagttcctggttctctgaacttggtactttgagacacagaccgataccacctccacctacttccacctcttcccagaccttcaactcccctggttctcaggccttcagatttgaactgaattaccccaccaatttcccggttccctggtgtacaaacagcatattgcgggaattcacagcctctttagttctaattcccataataagcctcttctatagcatatgtattatatttctctggagaaccctgattaatacaaaccccatatttatgcaaaacacagattggggttgcacattctagctcctaatttttccaacccaagatacctgaaaataccaatttcttcctattgctcccagtctagcaaacagagggaatttttccctattcccactttcctgaacatagcaacccttactagctcagtttcagtaccccaatttgcatggatccaattccttatcaccttcacacatagcctcaagggtctgagacccccatgaaccacccagcttcagtggtggctcactactctgtctaatttcagtctttgtttctggcaccaaagctttccatttattggattcacattcaaatatacatttaaataattttacatttttctagaatttctctctttttgtgtccagaaagtgattgggtggtattttatctgctaagcctgccatcttgacaaagtctcacagcaatatttcttaatataattctaatatcacttcattatgttcatacacaaaaagtgagttggaacattaaggtaattgcttggacattttgacaaagaaatgtttgccttaattttgtctttaattggtgatcatatgacttcaatctataaatattttgtggtttaataaaaattttgttgttttcatagtgactgatgatatattatttttaatacattagtaatccactaggcagattcaagatcaaatcaataaagtgccactgatataatcaataaacaactaggacctctttgtaactcagagcttaagaaaatctgaaagataagctgagatgtataaagtattcatataataaatgcatttttatttgttttagataattcaaacttgtaaatagattcatccaattttaaatagaaatgatttaaaacaatgtttatctcctgtttgttttattattttaagaaaaatatatctgaaattaataatgaatggccaaaggacagataagctaataatattgtataatagatcattcgatttagaacatctaactggaaaagctggaaatgagaagtttaaagttcaaggaggtctgaaatctaacaagcttaatcaaaggaaaagatgtgaaatgttcacaaaaaggagtctgcaaagccacacacagaaagattctgctagtgttggaaaagaatggcaactttttcctattaagaaaaaataaaaataggtcacattgttgaccttggccatcctctggcatagtcatgtcacagtcttaacacagagcataacacaaatggccaaagactctcaacatgtgagaacaatttctgaaaagggggtaggaaatcaattcatactaattttaactccctcttgtttctgcaaaggcttatcttgatttcttcgtgaactttaacactcttagtctccttgacacagttcagtctttatacagttccccttagactacaaaagagatcactggaccatagacagtgcaacagataaacatgacctgtcttgtactgaaaatgagtatgtcatactgagctgaaagaaaagaattattcagggtaaatattgtccagatgataggaccagatcacaggcagaaatacattaacgtttgcctttcaaaatggcacagcaactttttatacttatcatcaaaaagatcatcagaaaacagccctaagcctaatattgaagtaaatctcactccagtgtcacttgtctagtgttacagtagagctcacacatatggaagcaatcattcaatcaattaaagagaagaactcattaaataaaaacttttgtccattttttgctgagcactattgtgaaaatgagagaagtatatcttacatttcaataatacttcgttgtttagaaaatactttgatagctgttcacatgggaaaagactcagtatgtaatctgttcctcttattttcccattatgatagtcacacacagacatacacacacacacacacacacacacacacacatgcacacacacaattaaacaaaagtagagaacacaaaccatatgttaagtttatgaagagttgggaataggaattttatgaattcccatgtccatagggatagatgggaaaaaaagacatacttgaatattccaaaattcacttcctgaaagagaatgtcaagaattgctttaaacaaaaaaaaaactttaatctacatcctatcctttgcctctaatgtgaacagattctatatttatcagtgaacccatgagcagtcttcagctataagaggcaaaccctctgagtgtaccaaattttgctagtaattctccccaccatcagtacctttacttacacatccatttaggaaattaagttttaaatattcactatgattttatatcgtaatgtggtagcagttacattatttgtgtgtatttgccaaactcatggaactacactaaaaaaaaggtaaatattactccatgtaaattatattttagaaaaaaaaaaagcgaaaaagtggtaacaggtggaggcactgtcgtgaagaatctggatatagttacccagggaaaagcattacaaatagttgtttggacagatgaatgctggtgggctaacaaagtctaagggaagtagagtttactcaccctgtagcatttaccgaaccagggtccaaagaatgttcatagacatataacattcatgtgttagttcacagacattaacattactgttagtgaactattccctagtctcctagtctaggttagacatcttaaaaatatctgattttggccgggtgtggtagctcacgcctgtaatccccagcactttgggaggccgaggcaggcggatcacgaggtctagatcgagactatcctggccaacatggtgaaaccccgtctctactaaaaatacaaaaaaaaaaaaaaaaattatctgggcgtggtggcgcactcctgtagtgccagctactcaggaggctgagacaggagagttgcttgaactcgggaggcggaggttgcagtgagccgagatcgcgccactgcactccagcctggcgacagcatgagactccaactcaaaaaaaaaaaaaaaatttgatttgtaaagacaaggcccaatgtctttattattttatcttcaagcatctagaagagtggtacattaaaacatatatatcaaaagcacagatatatgaataaacaggagattaataatagatagttgtataatcctaaatttctgtcaaaaaacgaaggtatcagtctagtttagggtggcaataattagtagttaagtaaaagtttatgaagagaagatattaggtaccctgtaacagcatgttttcaatcagaagctaatggattcagtgttgcctcagtaattactgctttgaggagaaatcgttctagaaatcctctgtgttccataccatctctaattttgaaagcctgattaatagatagttttatggagaaatgagcattaaagaatgggttgaatttgaacagtaagaaagaagggcattccagagtagggaacatgtaccaaggtatgactatctcagttgttttacagtgaaagagaaataaatcagtaaagttaaacatgagaaataatgaaaaactcacagactgctaacagaattcagtgttgtttctttttttttttgagacggagtctcgctctgtcgcccaggccggactgcggactgcagtggcgcaatctcagctcactgcaagctccgcttcccgggttcacgccattctcctgcctcagcctcccgagtagctgggactacaggcgcccgccaccgcgcccggctaattttttgtatttttagtagagacggggtttcaccttgttagccaggatggtctcgatctcctgacctcatgatccagccgcctcggcctcccaaagtgctgggattacaggcgtgagccaccgcgcccggccagtgttgtttctttatgatcactacatattgacaacctagagtggaataatagtgtagtagttaaattcatgctctctacagccaaagtgcctgcattctgatttcatttctgacaccaattctcttgggtaaagtttttcaactcttagtacctcggtttccatgcctaaaaaataggcacaataaaaatactgatcctatgaagtggttctactggttaaataatttaatacatgtaaattacttagaagagtaactggtatattttagtgttcagtaaatattatcacttaatttaaggccacaagacatttcctgggaaggttagatacatctttcaacatttagcaaaattaaactcagtctttcctaagccagaattataacaacttacttccactttaagacaggttccagtactgtaacacaatcttatttagcttagtatggtacttaacatcataaaagtaaaaggaagactctaactcctctgagtatactccatgcattcccattgatggcatttaagaatcccaagtacagttacattagaattaaattgtgctaagcaatgggtgtgctaagcaatgggtagctcctgaaagcaatatatctctagaaaaagccatgtccctgctctgctttaaaaaaaaaaaaaagtagcaaaaactgttttaaaatgctaaaaacttcatttaaatcgcattgcacatgagccattggctttgtttgttgccttgaactagattcattcaaagaagtaactgaaatattaatttgatctgtgatttggaaaatgtttctcaataaaaatattcaaaagcctgactgcttctcagctctcagatgaattaagttttaactctgacatgaattgaacctctctctggggatgcttctctttagggggctgagatcacagagttcatccttatggcactagcagctctttgatttttgtcaggaggcctgccaccagagcgcaatgcatagcaacatcagggtatgtctcccatgttccctaatgaaaagctagcctggagacaggggcaggttggagggtaaatttcaaagaggggaaaggtcagttcttggtcaaagtatgaagagcttatgaaagaaagaaaacttcgaaaataaagcattaacataaattactgaaaacagcctttcaagtcttatagaaaaagatgaagcaatgctaccatgataaaggctcccctttttaaaggatgtctccatctttgtcctcttcttattacttcagaaaattatcagaaatgtcgatggatgcttctatttgagtttcttaaagaaaactttatggtcattgaaatttaaaagatcccacctctttaaatcagaaaggtgtaaggtcatggttagctttctgggaagaaaataaaatctgtaactttgccaggagaacagcctttactaatggagagggaaatggtaaaattgacataacattataacataaactgtgtaagtttaaagagatagggacatccatcagtgtcaataatctggtaaatttaatgatctataagtaaactaggtaattatttttccaaaatgaaggtttttggggacctaaaacatctactgtctacacagttcaaaggaataaaataactggccaatctccatttccactactgatccactggaatgaataacagaagaacaaaaatactctgaaagatcgagaaacaaaaactcagctaggcataaggaatatggcaaatacttcaggtctttgcaggcaagaagtcaataccagccgttcccaaattattgagttttggtctcagggcccccttggactcataaaaattattaaagatcccaaagaccatttgtttatatggattatatctttcaatatttgctattttacaaattaaacctgaaaaaaaaacattttttagttcactttgcaaaaaacaataaactcattatatgttaacataaacaacattgatttttatcaaaaattcctatattttcccaaacaaaaaaaattaatgagaatgacattatcttacacttttgaaaatcgcttttaatgtctagtttagtaaagacagctgaattttgtttctgtattcaatttgttgtgatatcttccctgtgattaaaaatatcaagaaaatatgttcttatacagaaatttaataggaaagggaaaaagtattttaatagtcttttcagacaaatttaggtgttcttctttggtactacaatgatacatgacaagtggcagtttctgtaaggttagttgcaatgtggactctgagatcatatcagtgaattttccatacactgttatattgaaatgaatgggtcaatgttaaattttgaatggctctttcacccatctatgatttatatcatcatgcactagtcgtttggaaaataatggctcactgagttatgtagatcctccattacaaaatacattttaaaaatcacattgattaatatcaccaccaatctcaatagaaaataactattgagaagctgtcaagctcacagtagtggatacaaattttccaaaaacttattttttctcgaaagctcaaattttattattggcaacaaatactgtgagttgttttccttgaagcaatagtttcatttcattcattatcaagaaaaaatattgccaaatatccaattctacatcatcacagtttgtcagtcattctttcaaataaaaatgatatgccgtgaaaaaagatgtctagttcagctcatttctcaaataactgtataagtgctttttctcaaggcttactctgtttgagtgtgcagcaaaagtgctttatgagtacttcctgtcttgtcacacagaatattgaaaaactagtactcaagcatccagatttaatcaaaataataagtgttactttttcatcaagaacattctatgtgaaactgcttttctttcttttttactgtgagtccactttggtactactgcctggatttatgctaaggtgccagcacttttacccaccattgcttttgcaccatcagtgcaaatgtcaacacaaagaaataagcaaagtgcactcagtcttctgtatctattggttctgcatcacaagatttcaaccaatcatggattgaaaatatttggaaaaaacaatacaagaataacaaataatacaaataaaaacaatacagtgcaacaactatttataaaacatttacattgcattaggtattataagtaacctagagcatacgggtgatgtgcataagttatatgcaaatactatgccattttatacaagggacttaaacatccaacagattttcatatccttgggggataaggagacagagttgaggatgggggtgtcctggaaccaatctcttgcagaaaccgagggatgactataatgccttagtgttattataaaaatatttttcagttcacatactccctgaaatggttctgtagacatccagagatccacagaccatattctgaaaactgacaaaataaagaagagttggttaacgcccaaggaataagcaagaactgtgagagtctgagtaagaagcagggccaatctctgaccagagccaagggctcctctaatgattgcacttgtaaattagaagggaaatctctgtactataggtattggtcatatcctgaaggaagtcaaacatgcgcagtcaaccttttttaaactcatgtcttgaggagaatatagagaattggttacaactgattggatacaactgtattcacaaggttaagaataatttcagtcaaaattagaacaggaagtctctagactttagaagtaatgtcatccaaaaaagagaaagattgttattattatactattttttattatattttttccaatatttttgaaagattctaagatgtataagtcccttgtataaaatggcatggtatttgcatataacctatgtagatcccccatatgttttaaattatctctagattatttataatacctaatgaaatgtaaatgctatataaatagttgttgcaccatattgttttcattttttttcctgttgtactttttttattatattttttccaaaaattttggaaagattcattcaataggtagaatgagtaaaaagctagggatatgatcaaatggctaatgtgttgcttaccttaacaaggaaagaaagatgaatccagatataaaagaaaaacaaaaaccagacaagaaattctgatccaaataagaagcaaattcagtaaggcatgattttgagtcattgatggaaagaaaaaatagataatcgattttgtctgatgccaggaaatttctcctttgagttgctcagggattttgactctggatttgtagagaaggaaatatttacatagttataatgataactagatctagatataattagccaatagacaagatttcaatatggcttcagaaaaacatgtaaatattaccaatattggagatgccaagcagaaaagatgggaagaaatggtagaaggcctaagaatatcctcagtgatggggagttgagagatgcaataagatcaataagaaacacagggaaactactatgcattgaagtgacggattattttaagttacaaagttaaagttaaaagacattttttaaatcatgcaactgtcttaaattgggaaacataagagggacaggtattgtgaatgagctaaatttttttagatatgctgagtcaatagataatgcttaaatgtgttaaatcaagaaactgggatgcaggccaggcatagtggctcacacctgtaatcccggcagtttgggaagctgaagtggacagatcgcttgagctcagcagtttgagaccagcctgggcaacatggtgaaacaccgtctctacaaaaattagccaggcaatggtggggtgcgcctgtggtcccagctactcaggaggctgaagtgggtgggagtcaggcttgagttccgaaggcagaggttgcagtgaaccaagaccgcactactgcactccagactggatgacagaggaagacactcaaaaagaaaaaaaaaagaaaaaaaaggaggaaaaaagaaagaaattaggatataaattgtattagtcaaacagctttaatatttgataactattatgacatagacacataatgatcagaacacaagtctatattcagaatggatgctgactgggacatactggctacatatcacctctgtttttaaaaaagaattagggaagtaataactgaaggaaataaagacaggaacaagccaaaaggtgggcagggttgagcggaactgttgctttttattaaaagcctttctgccctgttttaattgttactatatgcaagtattactatgataagtaatcgtaaattatgagtatcatgtttccaccctatccataattagcactgtttaaaaactatgctactattctctttaaagtatataagcaattgatatctaatacaatcaatcaataaaatgtgaaggtaaatgtttccttgatttagtagcagtttttaaaaatctctattgtattttcacatatattctcaaaaatatatgaaggaattacttcgagtgttaatctgggagataatttataattttaatttctttcccatgatgacagggaaacaatggaaaacagcctaaaacatataggttatctctagggcacatttctttaaaggttattaacatttttgaacaataggagattctcctaccaaaattaaagattatattgagaattttattttactttaatgaacgggcctgatgaaccataagttatatctatatggcacagttaactaccctttctgttcttcagatcaccatgagaataagagacctaaaataattacatgttgtattttgaggacattgcttcacttgaatttatgattagtacaattagtcacagatactgttggctgcaacaagtaagtctatgaaaaagcgtcttccaaataacacagatgcctttgctaaggattgtctgatattggactaattcattctgaaggtatctgaagtcagtatggatagttatctgtactgtaagatcaaaatatagactttactttcaattttcagacattccaaaacctagaattttgtagaattgtgtgtatattaataaatatgaaaaaatttatatctactggacagttgttacattataaggtataagggggtggggggatctcagaacacttgggttcatttggaggaggacttgacacagaacagttttaaaggcacagcccatttagccaaacacctccatcttaaatcaacttcgtcactctgtataagaatatctttgtgcagtattttggatcttcagggtcaaatagtatttcaggccatataatgcacttcttttgtgtgttttaaacaatcaaatagtagttccttctttgtttgtgtttactacaagttttggtagatcctctaggctataaatataatatttatacatagtttgataatacatatcaaaaactgtaaaatttctacatgtatgcacgtaatgttaacttcattagaaatgggaaaaagtctcactaaagtgagcaatattgaattaatcaaatcaaatagctttgtgtttgtagacttaagtctacaacagcctaataaaagcaaagataattcacagctttatctttaatcagatgggtgaacttttgagcctataaaatttacataaatataaaaaattttgaaagaatgttactgaagcctgtatgttattttaaatactgattaagtcttgggttatatatcaaaaccatcagttgtagcaagcatatgtagaaagataacaaaattagtttttagagttagtgtaagtttattagttaaagcaacaaagttacataaatcatacatactaaaacatttcatctggaagtataaggtagttaaagtagagtccttaagcacttatgacacattaaatacttgtgtattaaaaactattatagccagttagtggctcatgcctataatcccagcattttgggaggtcgaggtagaaggatcatcttgaggccaggagtttgagaccagcctgagccatataacaagactccatctctacaaaaatttaatacacacacacatgcacacacgcacacacgcacacacgcatgcacacacaataaacctcatttctacctaagaatgcaaatttaatgcactagcttttcccccatgcattcaattatttcttcatcattcatcctataaatatttattgagctccctgctcttaaactattgtagagaaggcagagacataaaatatatggccataatactgtgtgataagtactcttggttatttaccaagttaggccacttacagaaactaataaggttaattacaaaagtccctcaataattttacctctaaggtaactgggttttttaaaaagctccctgcattagcttcattatactataaaagaaatggcaagtgaaaaactccagaattattatatttacattaaggaaaatcaggcaagatgcctatcttctcaacttcatattcatttaatggacacccatacttcattttttcttcagttatagaaattcttgaaaggcattataactagatcattttaataagagaaaagaccatcatatagaaaatgactaaattattctcagcttaggatttcactatttatttattcatttatttatttatttttgcctcaggctttggggacattaaggccatgttataaatcctggtcactgctttttctaaagagcaaaaatgagagtttattagcagctcagtggttgccccaataatgacaaaacagttgctcattactgctcattagtttcatattagattcatttgcaatagcaatatatcttctattcatactcgactgcaaaacaacagatatgatttgacacctgctgtacaacagaattcattagatagtaataatacaaatagaaattcagaagctggacttttatttgcttctgtgatgactctgtacaagaaaatgcctttgaaatcatctaggctagaataacataaatatgcatagcagctgatcaggttttcaaatactgaattctctatttttctatctacaacaatgttctatatacataatgtaatattttaatgagtggcataattttcaaaataataaaccacttcttactatacagatgaaatgaaatattaaattagagaagcagatggaataaaaaaagaagcccaagacagtttttgaactgtaggataaaccgaactattttttcatacatttcatacttttttcatacatttatgccttcatccatgaagaataatcaggtttcaaagtgtacctaatcattcctcctgatattcaattatgtttgcttacttgaacaaatacttgtggctatttccacatgtcattgcatacaatgaaagaagaatgtttaactattattattttgtttggattcatgcaccctaaatcaccaaaatgcagccacaaattcaaaatgaaatgactgtttctgcttttctgagagttttagaaggaaaatctaatgtactttgtttcatgtaagaattaatcttctgcatttctacggaaaataaaatattaactagtcctttaaaatatatgagttggcccattgtggtggctcacacctgtaatcccagcactttgggaggacaaggcgggctgatcacttgaggtgaggagtttgtgaccagcctgcccaacttaatgaaaccccgtctctattaaaaatacaaaaattagccaggcgtggtgtcgcgcacctataagcccagctacttgggaggctgaggcaggagaatcgcttgaacctgggaggcagaggttgcagtgagccgagatcgcgccactgcactccagcctgggcgacagaataagactctgtctcaataataataaaaatagtagtagtaataataataatatgagtcattggagactttattttcttccattccacaacctctttttagttatctacaatattccagggactttaagatcatgatattcatacctttgtgtgactagaatttaacaccactatcaattctgtcagattacaaattacaaagaatctaaataatggttgaattcctaccgtatttcacaaacctagaacatggtagcaactcaataaatatttattaaatgaattaatgaatgagtgctgtgaaaaatataatagagaataatatctgctctttgttgtatataattctggtgaggaagtaaatctcaagagatatttaaaataaaagtaaaggctgggcgtggtggttcacgcctgtaatcccagcactttgggaggctgtggcggatcacccgatgtcaggagttcaagaccagcctggctaacattgtgaaaccccatttccactaaaaatataaaaaattagccaggtatggtggcatgcacctataatcccagctactcgggaggctgaggcagaattgcttgaacccagaaggcagaggatgcagtgagccaagaccatgccattgcactccagcttgggcaacaagagcgaaattccatctccaaaaaaaaaagtaaaatcagtatgtgtgaagataggtagtggagaccacacttattttgagaatgaagaaaaatggagagatcaccataagctgaaactgcagaggattatttttttttaatcatatggttatatatctttatccaagctctaaaggctgagctgaatttgcataggtggaagctcagaaacaaatattttaggcgagggaaaagaattggtccaaatttaaaggtagaaatgagcataggaaatgttgatgctatcttcaacaggtgttttacaatataaagtttgtaaatgtattttcacagaaacaatgcctcttttcagacattagaataatgctgttacaactgttaaagcatgcttcattttgtgtttggaaattaatctgctaacatcacaaaatacatcatttgcatgcagacttgtagaaagaaaatcaacacagggtcatgatgcccatcaagtaaattcatgccacttatatacaatagtgttggaagttaaattgtctaaaattagttaatgattctagtgttagtatgtacactacaatttaggtaaataaactcaaattcaaacaggtatattctcaaaaagtaaaatttccatcctgataattgaccataacaaacatatacataaactaagctttacaataatcaaagccttaagtaaatgttacattctgtaacagatattttgtactagaaagcagatcacaggagggcttattgcccttcttgcttaaaaaagaaaatccaaccagaaattcaaatttaaaatgacaaaatatgggttccatataatgtatcttgactgcttactattatttattccttgggtcttcataacaactgacataaaatcacattgcaacatttttttgtttttaaaacacctggctttagcaccaccgggaaaattattttatgttttttaaaattcatgaatatgtatcaatattatctctattatttacattatcagttaatgtctaatatagagtttccagggttagcgtataaaaatataagatgcacagttaaatttgaatttcagaaaactgcaaattatttttagcataattatattccatgcaatattttgagcatagtttgactataaaattagtttatctgaaatttaactggatgtcctctaccttttctggcaattttagcataaaacagtgcattgcattctcaaaagcaattgtttctacaaccttcttttcttctcatcatataccatggtgtcttgtggcctgtgatttcagttataattctaatccaggctgaatcaaggcagttggtatttatacatttttctcacacaaaattatgttttctaataatttacaaaattttaactttctaataattgtttactataacttgtttactataactgttaaatcttgtcactgaggccttcctatagattgaattcttagtgtaatttatacttgcactatttagaacagatagataccattcctaattccagactgccattttgcaaatattaggaaatgctttctctctttactttaattcaaagattaatagtttttgactctttctcagaatcctgtgtttaatagtaagaatcaactctcttcttttcttcctgctcattctcaatctcttgctcttttttctctttgtctctttttctttcacgcatacatacacgcatacagcacacacacacaaacacacacatcctgacctaccacaacctatgggactataatatgcttttatagttcctaccaaggtagttcttgaagccatagaggtactaagccactgtgtattctctgaagatgtgatatgatttgtatgacttttctaaaatgtattactgagtggttcagtgactaagtctatttccttctttcaggacttgtaaatgagcctcttaccaaaagctttttattagaatggcaattgactgttttctaatctgttattgcaatgattttagcctgtgaaacaaatctaggcattattctgaaataatgagtgatgtttgaaatagagaagtttaaacctgagcttcaagaaaaataaaataaatacatccttggacagccatttgtcatttgttttggattttgttcataaaatggaataatctattcctttaatattcctcaataatggttaactttttaaattatgtcctctgccaaagaaaagtatactcaatacaaggaatacagatttccctttcatatatgtggtaatttttctctacctaacattttatctgagtactttcaataaaacaggcaaataggataaatgtattgtttagtgaaatatcaaaaaatcctgaaggtgatcaggcattattgagacatatactagttcttccagtatagtggaaaatcatttgaaactgtattaaataatcacctatcaaattctctgcagttacagtgaatgtagagacttacagtccagttagctggtcattattctacttccagggaccagttagtggcccatttactctaatttcacacttgaaaggcaaagaaatgtataaacattatgttaacattcatgcaatgaagaaagaaggcttgcaattttaattatcatctagaaaatattaagttttgtccaatatattgtattctgcatgatatgactatataattagccaggtcagcctgtagggatttatatgcaaaaactattttgtcaggaaaccatgtttacacagggattaaacaacatctaagaagataaagatattaacatttaaaatattatctaaatagattgctttcttctaaaaatgtagaatcttctgtggttacaaaagtaatgcaagctcataatggaaaatttcaaaattatagaaagtgtgtagattaaaatgaaaatttcttactctagcactttttcagatatctcttgctttttgatacagttgtttctggtcttctaaatattgatatttttataaaatttggattatatgttgcttttaataataagataattaaaatttaaaagacaatgggtaaagtaaaaaataaatgaggcctaactgaagaaatgttgatgcaaaacaaatctgttgaaatgacataaaaatgcaagaagaagaaaaatataaaacatatgtaagatatataaaaagacatggaagaattattgagagggtcagtaaaaacattcagtgagataggaggtaaacattttctcactttggtagggtgtctactgttaaagcaagggcattgattgggaaagaataggatcatgtaagttggaagacccagatgaagctagggacattaaactcctaaattcgaatgagtcttctttgacagtagaagagacctccccagccctactggaggggatctctccaacctcaagggtagtagcctctctaacctcctctaaggggattgctgctgctttgactaaagaaactgaaatagcctcccctgaggcagatggtaagcaaggcaatgctgattctcctaagaacccaccccaccacctctctttgcttccagacctgtagctagactcatgtcccagcatccccctagaggtaaggtaaaaagtataacccctgagggtatgtgctaccctccagaagaactacttgagttttctactttatacagagagaaatctgggggacatgtgtggaaactggtataaagggtgtgagataatagtgaaaggcaaataatgttggatcaggcgtattggcatagagtcactgagcagagattctgcatttaatgttaaagctttggcagttaggagggattttaaaagtttgtttggtggaaagtgaagaatggaccaaaaggtggcccacagtgagtaaattaaaaatgccagacatgccttggtttgacttagtggaaagaattcaaagtcttagggagattggaatgttagagtggatttaccatttaagatccattcacttatattggaacggtctagaagacataccactgaccaatactgtgaggaaataaatttgtaagtgaagcctcagcattcttgaaaatctttgtgatcactcttctctgtggagcagacctcacagtgggaattgaagtcactacattagaaaacctaaatgcaatgggagtaattggatcctggatgccaagggccaagaggcaggattcaatctccaaggcaaggtgggtatggttactgtgaaggacagtagagtcaaagcaacaatcagaagagctggccttgaactgacctatggcattggctatttaattatgggtgttcctaaaagtgaaacagaaaggaagcctactaaattcttacttgacctttacggacagaaaagttctaggtcaagtgaacagaagtctaatttgagtcatagaaatggagagtcatgacctcccaattcctagacaagccagtttacatacagatccagaatccttctaatgagggcaaggctgggtccccttgaggaaggaccccagtacattgtcgaaaatgaataatattaatctttctctcagccttccccaaagacctttggactttgactggaactgacaccatcaatattcttccttctcagttctttagactaagactgaaactataccatcagttctcctgcatcttctgtttgctaaatagagatcttgggacttctcagcctccaaaattaaatgaacccatttctcataataaatctctctctctccctctctctctctctctctctctcatatatatgtatgtacatatacacactcatacatatgtgtgtttatgtatgtatatgtaattgattcttttctctggaaaatcgtggctaacagaacgaatacagttggcccttgaacaacacagactcaagctgcataggtccacttaacatgtggattttcttccacctcttccagcccgagacagcaagaataacctctccttttcctcctcctccccaccctacataacgtaaagatgacaaggataaaggcatatgacaatctacttccacataataaatactaaatatattttcctcttataattttcttaataacattttctctgcttactttatgtaagaatacaatacatattacatataacatacaaaatatgtgttaatcaactgtttatgttattgtgaaggcttctggtcaacataagcctattagtagttaagttctggggaagtcaaaagttatacacagattttctactgtgcagggaatcactgtccctaacccccatattgttcaatggtcaactgtatgcctatattaagagaaaactttaaaataaaattttaaaaaatcactaaagacagctactgataataaaagttttcgtaaatacaacatttctaaatgtatgtgcctccaagaacataacctcataactcataaagcaatatgctaaaattacaaagggaaatagaaaatccacaataatgctgactactttaacaaacttgtctctgtaaataacagaagaagaaaaaataagaatgtagtgttttgaacataaaaaccacaagaaaaaaacctttaaataaacactgaacattttttaaagaactataagttgtaacaaatttcaatgaactgaaatcatacagagcatgttttctaatcagagtgaaactaaactagaaatcaattacagtagaataactaaaaactccttttgaatatttcttaaaaagtcaattacactagggtcaaataagatctatatagtacatgacgcaaagatgaacttacaataaaaaattaggaaatattgtcaactgatgaaaatacatagtatcaaatttaagttcatattatagaaaaaacaggaagatgaaaaggaaggaaggaacgaagaaaggaagcaggagaggaagaaaattacaaaggaaaacagacaaatccacaataatagctactgtttatttaacagtaatttaacagtttatttaacaataatgcctaatgtctatttaaaggtttttttcctgtggttaacaaacgtgaaggaaggaagaaaagaaggaaggcagaaggaaggtaggaaggaaggaaactaacaatctaagcatccaatttatgtagttagtaaagaaaaagaaaaaggaattacatctctccccaaaaagcagaaggaataaaatataaatataaaagcagataataaaatataaaacaaggatattatacagaaagtgaggaaatggttaatacataattcaatagactggttatatctgataaaggaggaaagaggatgtcttagtcaatttgtgctataacaaaacaccagagactgggtaatttaagaagaacacagatttattttctcactgttctagaggctgagaagtccaagatcaaggcactggaaagtttagttgtctgatgaatgttgccctctgctttccagatggcaccttgttgctgcatcccacagagaaggaggaatgtggtatactcacagggagaaggtagaaggtgattccctctgccaacccctttaataagggcaactaattccattcacaaggaaggagctctcatggcctaatgacctcttaaaggcctcgccttctaatactagcccattggcaactcctgaattttgtaggggacactttgaaatggtagcagggaatatcattagggaagtgtgcactatttttacagtcacttctcatttcttgtactgaaaaaacaaattccatgattaggaaaatataatctgtgaatttatttaactggacatatgatatatcttgcaggtatatacatacattgctatatgtagagtaaaaaaaataaactagtgtctgagaaagcaacctctcaaggtgtaccatggagcctcttctactttcttgtctgtgaaccacttgtactgaatatcagccatgaccatgtgatatataaacaaagggaagccaccagtgcaatctgtatagtaaattttaataaaggttgatgtctttatttttaattttaaaataatacaattgacagatctagtatgtcttctaaccactcaatcaatcattttgttttcacccatgatgttcacaccttgcgttgtatccacatattatttaattccaatgacttgattttctacagggtcagttctaatcactaatgttctttctgtcattcaacatatcagaccagttcattttcactttattcatacagctcatattttattaaaattgtgaagagtacaatacagatgcttaagaaaaattttgtttcccatttagatatgattcttctattatctttaagcctacgctttacttacatgagagcatactttcatttattctccatactgtttttttctcctacttacccatcctttaatgagaataaatatatgcaggcctataggttgtaaattgacagggtgagtgtatattccagtgtccaatacttaatgtccactaggacaccaccaaaattctcctctcataccttaagctgaagcacaataggtatgtacagaacctccccaagtttgtggtgtctaaagacacttagttggtaagcctagggcaggatttatttttacttatctccactacctggctcctttacaatgagaaagcaacttggtatattaaattggagagcttagagtctcaaatcagactgtctgggttcaaatcccatcttcacaacctattagaggtgtgaccttgggcaaatcacttaatttgtcattgccttagttagcacatttctaaaatagagatgatgatcatctctacctcacagcagtattataatttcatgacaaacaagtatgagctcttattaatttatgtttagatatactttttactaaaaatgctgcatgaaaaaaatttctttagagtaccaactccctattttttttctaattctgttcttatttactgccaatttaatatcaagggttagtgtcccctactcacccttggctagtttacgtactgtgaatttcaaccactcaatggataagggcaacttagcctgttggttaattttgctcaccccatcagggaaaaaccgtgactcttttggttggaatataggtctccattggaaaatcggggtatgcagggagtttcctatctcctacctgtcagaggcacaggcatgcttgtgattgtttcttcttctgatctttctgcacagttaatcctttcagagtctgacaactctttgtatccctcccaccccacagcactccttatctattaacaaactgggctaattgtttgttgtctgctcccaactccatggcagctagaataatatctctgcaaggacagggaattttctatatatgtttacataaggacagggaatttcctctatatgtttacttaaaacagggcctggccctgtgtaagatttcaaataaatgctttttaatatattaacaaccttactttttagtacaactgtgactctacaagtgttctgttttcaaaggcatttcaatggggaactccatcaggtgaaactagctggcctccataccttggaggtcaggtgcattgtttttagaaccaatcatttgaactttccccaatgtatgacaatttaaaaatatatatatttaacagcccagggcatctttttttggtaatgtcagagaagacaattgaagtcactgaatttgcattaagagcagcaactttccttcaaatgatagctgccctagggcaagggcaaaacttcagccatattggttagacagagatgaaaaactggattggtcacaggccctgctctacatatatcatccagtgaaattggttttagttagaaatattaatggcattccttttttgggtttccaccacttcttttcagttctaaagttctgcctccatttatggttgcttcaactgccagtcggaaagcttctatccaaggctgtcagcagaagacacttgaactggaatttcaatgaagtattgtaaataattatttagtatcattcctctaatgaatcacattaaatcagggaagaaacacacaagttgtgtctggtgtgcttttcctctttatgaatttttttccttcctaataatagtgcttaaaattttaagatggtaagagatatattcatggtatttacattttattttgttatattttattttgtaaattttattttgacattttattttgcaaacaccaaggttaatacacagggaaaaccaaaaacagttccataaaatgaaattataatggttgaaatctagagattctcattgttatgccacagtttatgctattatctgaactaaatatcactctgtgaaaaacagtatctgggtctgccatttttcaacaattttctgattttctaatatcaactgggtggcttataattcaatcctcttatgacactaactctaggatagcatcagattccccagatataagggctaaatctcacattagggctcaagacacactgccccaaaatatgactgtagaacaccagacactgttactccaaaatatatttctttggcatgttttgagctggttattctgagaaaaggcaaacaaaagagtagctctgaaatttacagtttttcaggagcaaaatttacagtaatcaggaagtcaccctatatggtctaaaaaggggaggcatgaataatccacctttgtttagcatatcatcaagaaataaccacaaaaatgggcaaccagcagccctcagggctgctatgtctatggagtagccattcttttattcctttactttcctaataaacttgctttcactttattctatggactcgccctgaattctttcttgcatgagatccaagaaccctctcttggggtctggattgggacccctttcctgtaacatgagcaccaccctttcagcacttcaatgttttggagcaaccagaagctcctctaacattattgttcaagaggttttttttaaggctttatttatcaggcatgcttaattaaatcactgtcattggcaattgaactcaatcttcagccctcttcccctctccagagtttggggggatagggctgaaagttcaagccctcaaattacttctgtggcttattcttcccttgaaaccatgtaagggcctacctggactacactcgttagcataaactcaggtatgttaagggggctcattataaataacaaaatacacaccagacacttaagaaattccaaagaatttagacactctgtgccaggtataaaaaggacaaagaccaaatctatttttcattataacacagtggaaaaatcatatttactccaagacattttacgtattatatcttaataacactaaatattttagttaccattatgcagccaggtttttcaatgaaaaatataaaacgtaaaactttcagtgtattttagagtgttgaaagcttgacatgtcaatatctgaaaattcaaagttttacaaattgtaacttggaagaaggaggcttgtaaagaagaattacctttcaaaaaagagcaacgtttaaattttagatatattctactttctatgtttttataaaaaaatttaattccagttttaggtgaataaaaaaatcaagcagcaaaaaacaaaaatctattgaagtttcttctttaaatgccaatatattttcatgatgaaacatgaaaataggtatagcgtaaaaagatctttaaatatcataaccaaaatttgattattaccagtacataacttgtatgcatttgcagaaggcatttatgtaacttccattcaaatttatttgtgtctgttatttacacatctactaatgtcatcaaaatgcataatgaggcagcaatgcagaatatccagctttgtataatatgtttacacattctgactgctaatacgctagaaataagtcaaaatgctctatcagtggtaactttgtaaagaacttaattttttggttatctgaaatgtttgaatctgtaattccttttctatatttttataaataagtaataataaattgctaaaaagtttttaaaaaacagatatgattcttgccttaaaaaagatacagggccgggcgcggtggctcacgcctgtagtcccagcactttgggaggccgaggcgggcggatcacgaggtcaggagatcgagaccacggtgaaaccccgtctctactaaaaatacaaaaaattagccgggcgcagtggcgggcgcctgtagtcccagctactcgggaggctgaggcaggagaatggcgtgaacccggaaggcggagcttgcagtgagcggagatcgcgccacagcactccctcctgggcgacagaacgagactccgtctcaaaaaaaaaaaaaaaaaaaaaaaagatacagtaccttgctcactacaaactgattaaaatattcataataatttcatattggactgcaaaattttgttaatttactcaaatttgcttatgctatagggtaatactttcataatactttcaggagataatagaaatatcacctaaataataatgatatcacaatgtttccactttctcacagcagggatttaacaacagctatttttagcagagacaattctttgctaattgattcatttttatcagttttaaaattgatacatgtattaaaaattggtgcaccaactcgggaatatattatattgtaatctgctctaggtagtctgccgtgctatattcctaaggagataaattaccaaatctgcatattgtgcattggtcaagagtaatgtaaattatcaatactgtatggtcaaagataactccacttaatacaatgtcctttctgctacatttaaatatctggctaatttcttattatgagagcagattcactgattacaatctttcaagatatggggaaaagatattaaataaaaacagtttcgtaaaaccagtgatcaattagcttcagtgcaagggaaaatttcataattcttaccagttaaaaccaggtatagcctttacccttgcattctgcttcaacaactcaggttaccacttctgttgaataatccaaaagacccatttcactcctatactgcttgcacactatgcagcattgcatttcagttcacaaatatgctttgggtacttagatatgcaagacactatgtttggtcctgggaattcaaagatgaatacggcatgattctcgcctttgaaaaatttatagcctagtatgggaaactgacattaaattgaatgataccacattttagaacttttgttagttttataaaaaagagacacattaaaggtagttgaggtaaaagagtattattgtgtaggtgtagatctgcagtagccacctaaagacccagaaccaggaaggtatcaagaaggaacagaacccaagtggaaactctgcttcttttttttaggttctgctaacaccttgattttccctcagtaaaatccacttcagatttctgaccctgagaattttaagataatacatttgtgcaattttaagctataattggtaatttgttacaggcacaatagagcactaatacagaagttatacaatcattttttttatcctggtagtggctatattcaaattttaggaatatttagcttatatttctctgccaaatcaagaacacctattaagtcctcttgtgtggctacatcagagatttaacaagcatttagcttttgccatcatttttcatcttaggtttgttcatttccttcttcacttgtttgtgtgtttgttaaattattccgctttttaaattcaactaattattaattaacattgttaatatgatgcagtataatgtttgttctggagtcaagcatgcttggctatgaatcctggccttactatttcctggctgtgggaccatggacaaattatgcagactttctgattctattgaccttacatggaaaatcggttgagaattcaatacctatctcattattattttatattaaattaaatgatgcatgaaaagcatctggcacttaggcaatcactcaataagcaagaaatgtcataatcttccctttcaagaactctttttgacctttgcactaagtatttaaattgttatcatacatatttatgtgtataaaaaataaaatttatttaagtgtttttattgctcacttcaatgtttcagttattttattaaaatccactttcatttgacaagaatttttttttggctaaaattttgagaaaaaatatggagatggtatgttttgtgagccattgcacagcatgggaaaacatgttgccctcaaatgtaaatgttagcttagctaggtatagaatattggaaattattacatatgaagttcttgatctctgtcttcagacatttgatttttatacagatcaattctgaggcaaatttgattttgtttttttcttatagctagcttttttttttgtaatcaagtgaagacatttattcactcaggtaaatttcttcaaatgttttctttgatgattggttctctatctcctcctttttcttgttctagaattaattctgtggactcttgagttacactgcctggatctaccacttacaaatcttttatcttgggcaagttgcttaaattttctgtgcctcagttttctaatctataaaatagagagcataataatatccatcttacagttttgttataaggataaaatttgttattgtatgtaaaggagtaaaacttgcctagcacataagtgttcaaaaactattaattattattgatagtgttttaattatacactcttgcagaatgtctaatttgcagattctccattgtatgttttaatttaattaattatttttttgaaatggagtcttgctctgtctcccaggcgggaatgcagtggcgcaatcttggctcactgcaacctccgcctcccaggtctcagcttcaaggattctcctgcctcagcctcccgagtagctgggattacaggtgcacaccaccatacccggctaagttttgtatttttttaattagtagagatggggattcaccatgttggccaggctggtctcaaaactcttgacctcaggtgatctgcccgcctcagcctccaaaagtgctgggattacagccgtgagccaccacctggccatgttttagttttagaacagtgttttgcatctaaatgcaatcttttaaaaatttctaaattgttgcatttttatagacaacgtgttttctagactctcgtggagaatatgaagtagagatttctgaaaatttgctactgtttcttggaataaatctgtttttatttatcctcaaaagacatttgctttacctcctcacaatagttttcatacctgaaactaccaaatactttcatttgactggcgaattttctgtttgctcaactttacggagtctgacattttgtttaggggagttgacatgagaacaacaagaaattataggggtttccttttctaacttttaactcttgtcaaaaggggaaaaaaaagtttactttttttgtacctttattttattaaatctgggagtcccaagtggctgcagtgagcactacgagaatttctggggagcagtcacaggatagaaaaccctccactttggtaagaggtgtcttttgacacagttgttgaatagcccaaagtaagctgagcacctgtccctacctttccacctgacgtgactaatctccttggtaacctgttgtgatgttgcccacctcagccagttgtcctattagtgaatactattgcaccagtaaaagtcattttatttgctctccactgactactccagggagctcaattcccagctctgttcaaatattaaattttggagaggaggctcaaattctgctctcttattccacaggcaaacttcctccatcataactgcctaatcagagactagttattatggtccccaatttgatcccatccgcgcagattttgtaggggcaattttctccgctggggcctcttcatggccttctttcctgttatccaacactgctaatgatttctttttcacttttcccactatttgcatttctctgatcaattccttggcacttagggaaagagcgttaaatatatgtgctcacattactatcctaaagtggaaagctcctatttttcttttttatgggagatctttgctttcccaaagcactgacattagtatataatgaacccagatttgaagtatgtgattaaatatggaataaatctctttgaaagggaagtcagttaccttatttcttattaatgatagtaaagctagtctcttagatttgttgttaaatctctgttaagcaaacaaaccagatcacatgaattttcttaagctgatacttgataattacgtgaaaatattcgtagtacatactgcatcataatagagacaacaaatatgtagaagaaatctcacttgaatattagaaaatatattttattttctttctttattttttgatacagagtcttgctctgccacgcaggctggagtacagtggcacgatctcagcttactgcagcctctgcctcccaaggtaaaagcgattctcctgcctcagccctgccttgtagctgggattacaggtgcacgccaccaatcctggctaatttttgtatttttagtagagacagggtttcaccacgttggccaagctggtctcgaactcttgacctcaggtgatccacctgcctcggcctctcaaaatgctgagattacaggcattagccaccatgcctggctgaaaatatattttaaaaaccagaagttttagaactattaaatttggtccagttctgaaatgagagcaatttttaaatttggttcatcgtaccttgttaattctaaaagtttcaattttgtgaatcatgtatgtgagtgtttgcccatattttaaaactaaaattccatttgtagcagagaattttagattcttatgttcctcaaatttatatttcaaaagtagttttaaaatttataaatgtaatgttgtaatattgaattataccttctttaagttataatacttctatatctgatatcccctccaggctagctaagaatacatctgactcctctaattcctctggataaaaatagtgaccactgtggagaaattacatctaaactttggtgttgtttatttacctttatagtagcgatacagtatggctaagaacaaaactctgattttttttcttgtaattctcttctctgtgggctaggcacacctgaccacttccaattataagggtataatgacaggttctctctattctgcaggtttgttccatctgcctgaaatgcttctcctgccccaggacctcagcacttcccggtttacaccctcactgcatccacataacctctgcatatacattagttatgtgtccccttctctgataaatttccctgtaccacaaagcttagcttgtattccctgaatatgcttatcaatattacagaactttttatacaatattttagatgcatttttaaatgcttttcttaggagataaataaattgaactcatagcaagcaaggactaggtcttcctcaaatttgtaactacaatgccaagcataacatccaattctcaaaaaatatttgtggaattaactgctgaataatgtgaccacgttaaacattagaacaataaggagaaatttttacgttgctatcacaaagttggcaacactaagaatacaagtaactattaatactttaagtgtcagggtagtgcctgctttaagactaattaataagtatatccgcttttttttaggaaattcagcagtggtcccatacatgtaaacattatgcaatattaactttagcatttagccatgactcatattgatactagctttttatagcaaatgagatatagacaagtgagacaattgtctaggtaactgcagtgtatgatgagaatagaaagctttgacctaaatgatagtaagtatgtaacttgatccatctttgattttcaaatgctacagaaaaataactagcattccagttattttagaattattcagacttcctggcttcttagttctggtgtaaactctccctttaaacaagtgctttttaatgtttgcagcacatcaaaataacctgtgtgatattattcaccaagctgaatttctgtagatgaccagagcatctaactacttctcagacagtactagtttcctattgctcagagtaaagagtaaataaatactgcttcaagaaatggagtattgattagattacacaaaattaaagtagaacaactggatgaactagaaaactataaactttcaacttttcaaacaattcaaactttttagaaggcgaatacaaatacacatatgaaacaaaaaaagcactttaggaatggatttaaaaggagcattaaaaataaaaataaatctaaaacaacgtgacataactacgaataaacatattaaaacatgtagaaggtctacatggagaaaatgttaaaatattacttagggacattgcttgaaatagtaaaacacagaatgctaattaagtgacaattaacagatctggtcaactaaagtatgatgcttccatataatcaagtactacctacccactgaaaacaaaaggatagtttatttctatgatataaaacaattgccaagataaactgttttgtttttagagacagagtcttgctctgttgtcccggcctggagggcagtggtgtgataacagctcactgcagcctcttggcctcaagcaatcctcccacctcagcctcctacctaactctgactacaggtgtgtaccaccatgtctggctaattttttaatatttttagagacagagtctcaatatgttttgaaggctggtcttgaactcctggcctcaagcagtcttcctgcctcagcctcccaagtcactgggattacaggtgcaaagcaccatgccctgctaagatatactgttaagtgccaaatgaaggttattgtgccaagtatgctactatttgtgttaaaagcagaaaaatacatgttctatgtaagtgtatgtacataaacatttgcatgtattatatgcttaaatatgaatgtctccagacaggctcataagaaattgtggatgcttctgggaaacagagctggcatgagacactttccattgtataactttttgtacaactgaacattttttaaagtgcacatattatctttttctaaaataataaagtaaaatctccaagttaattctgatacctggaactaaaagccattggtccagtataaaacatttggaccttgataaatccactgcatagtatagcacatgttcttaacctttattgtgccatagacccctttgatagtctaggagagtgtttggacccattctctataagtttttgatgttttaaaaatggataaaactaaaaatatacaattataaaagaaacaaagtatgttaaaattggtttttaaatattagacctggcagtaggtctaatatcagccagacttttgtaatactgatgaatatgaatgatattttggaagagctaaacagctctattgtgatatgaaaacatcttcaactactttttgtgggaaaaaatcacacataatgctaatcctaatgatttgctatataattacaggaaatgctaaattccagtacaaatgagtgaaaaattaaaatgtgatttttttttccctcctttccaagctcacagattgttcctaacatctaaccagggacccactgagtgtgtatggactccaaattaagcactctgtataagaatgcactgggcttacatcccttcatatccaaaataaaaaatgtaatacagacctttatcatagaggtttcaaattagtattaaaacattactttagaatttttcttaatcccaatttatacgtatgcttggactaaatatttattgtctccaagatactgcagacaacaaattagccaaaaatactatgaccgtttatctgggtttatactaccatgaaataaaaatatatctaatcactcagtgaatcccttccatatagacatctgttaatattaattctatcttttctttgtaatagaactttccctcttttccccaccccacccccaaatcagtggattgaattttcagcattttctttatttttctgttatgcaaaggactcagccagtagcatcccccatacctttccacattatcacaattggctaccgaaacctacatcttcattccattttatatagtattaactttgtaagcctggaaaatatgattgaaagaaattgttcaagttccaatgtccctgacttttaaacactgtttcttccttttgtctcaaccatcaaaagtgttaatacttcataccctgtttaggttgtaaaatgtccacttgaaacccttaatcagtcagaacgttggtaaattataccttcatgctatccatattgagtacccattactcctggacatagcacattaactgactcattagctatttcaaaccatatggacttgggtttgggtgggtcattttgataatatcctgaggtgagtttcctaattattgcaattatgtgatctcaatcatgaggtcaggctcacaaaatagtgtcagtgcctttagaatgggtgtcactgcacccagacaatgactgagatgagcaacatgctctttggttgttataagtcccttgatactaaagaaagtaattacttgaaaagttctgtgaaaccgccaggaacagcctgtgaattgagtgagcatggaatgctataatgcttgacagtcatggatacattgcctagagttcacagtgggaaaatgtgaatgccacagtgctgatgctacgtagacattatgtttctaatgtaaattttgtatagtgttttaagcaacaaggcagattttgtaaaagttgaggggagtaggaaaagagcaaatgtaggaaaagagtatgttgtcattgagaaattctgtgatggtgtcacaaaacgaatatgagaggtaagaaattcatatactgtgctgcccacgatggctcacgcctgcaaccccagcactttgggaggccgaggtgggcagatcacttgagcagaggagtttgagaccagcccaggcaacatggctaaacttcatctctataaaaatacaaaaattagctaagcatggtggcccttgcctgtagtcccagctactcaggaggctgagactgagggattgcttgaacccaggaggcagaggttgcagtgagccaagatcacaccactgcacttctgcctgggcaacagagcaagaccctgactcaaaaaagaaaaaaatatgaggaagtttacgtactggaaggtaggatagatatcaagagatatttttaaataattacagaggttgttttactatggtaaaatatacataacataaaagttagcattttaaccatttcaaaagagtatagttttgtggcattatgcacattcacattgttctgcaacatcaccaccaaccatctcgagacctttttcatcttcccagactgaaactctgtagccattaaagaataactccacatatcccttcctcacatactctggcaactaccaacctcctttctgtgtgtatgaatttgactactttaggcacgtcaaataagttgaatcataccgtatctgtccttttgtgactggcttatgtcacttagcatgtcttcaatgttcatccctgttgtagtacgtatcagaattttcttccaagactgagtgatattccattgtgtgtatatgtgtgtgtttgtatgtgtgcatataacaaaatttctatatacatacacactacattttgtttctccattcaattgtcaatggaccctttggttgcttcttggcttttgtgagtaatgttgctatgaacatccgtatatatgtatatatatatctgtacaaatctctgccttcaaatctgaaaggttatctttgaaggaaaaaaatagtaaatgtattttttgaaagcctaccctctgcctaaaaattgctaacaaattaaaataaaatgtctgcaattaaaatgatcatcaatttgaaagtgaaatcaaggaaatccccaaagcttaccatttcctttgatgtttctgtcttcgtctttagatagcagtcaaagatacacattagaaatcaaagatttctgtttctaggcctttaagatatgtatgaaaaaattagtataatcagagctgctaagatgggtcagctggaaacagcacctgaacatcattaaagaatcaatatagaagctttggagaggagtggtcatgctcactaccaaactatctaaatatagagatttactaaaaaaaggaaagaagtttgtaatcacacaattgagtattaatgatgaacaataactagttggtaagaattttttttttttttttttgagacggagtctcactctgtagcccaggctggagtgcagtgacgctgtctcagctcatggctcactgccagctccgcctcccgggttcacgtcattctcctgtctcagcctccctcccaagtagctgggactacaggcgccggccaccaaatcctgtctctactaaaagtacaaaaaatatttttgactcccaggaaaagtacaaagatgaggagagaggagagcagtcctgaaataaacatgtatttaggctgaaattatagtttctgtgaatcggccttaggtttcacaaccacaatttacacttgtaaataggttgagggttcagtggcaaatatttccaatttagaggtagatatgacaggattagaaaataaataaataaggaattaatagaagtttttttgggggggtgctattacattaaaataattaaactacttaagtgagtaaaacctcaattagtagtggaactctaaattcagttaatttgtaatagttaacagcagttcattgagaagaaactcccactggctttaacaatactgtttatttttggtggaaaagagaattgtggccttcctgatattttattttggaattgtttgtcctaaaattgggcctatccaactttatttctagccagcctatccacagatccatttagagcaaatctgttacctcccatgtaagggccaaaacctcttaagacattttatttcaaagttttgatgctatcataaagaatcgactcctacaatactaagctcttaagatgtcacatcatatttaagtaataatgcatgctgaagatgctaaatttaattggttagtgtgagagcaattttatgagaagaatccatcattttgggggctaaacattatcaaaagaaattcaaatataaaggaaaaaacctttaccagaaaccaaatgtaaatatggatgacagatattgcttttacacatgggggttaatttgtagaataaagagagaatggctatgtgataaggcttctcttgtgggcaaagtacgcttcatatggtcattctttagttgagccatccttgtccttaatcccatgttgcactgaacaccatatgcagtttagtagagtggctaatagcacagattctatagttaaacttcctaggttcaaatcctgtctctgcttattccaagatatgtgaccttaggcagataactaaactgctcagatcctcaggctgattcactgtaaaataggcacaagaaaaggcattgctcatattttttttttttttaactattagttaatatctataaagcaattagaactgggcctgccatatactgatagctcattatgtggtaagccattactattgctatgactgagaaagtcgtttccttcttctttttggcttcttaagaagaattcaaaggccaattttggagaaatccctaagtaaacagccagacaaaggaagagaatcataggctagttttcattttaatcaaaatgtctgctatattttaatcattttaagttaaatgtcttttatctaccttatgtttgttgctcaaggttattttataaattttgctcattcataagccacaaattatcttattgtctgacttagttctgacagagaaccaagaaatgtggcctgaacttatttttcagaaatggaatgaatccccaagatggcttaaggatgcccttctgttttggaatgctttctcttggtgtatatcaaggttggttcagtttaccagagaaaagatgccaggtgggtggcctttatagaaaaggtaagcttctgctaaggacactcaaaaccttttgcttgacctttgcagattaccgactcctgtttagcctttctcagtagtgcttcctttatctaacttttgctcccatactcctagtttcttttcatctaatttataaggtgtacaaagctattcatcaatatataatggtctctgtgatttcagtacagatgactactccttatgcattaaataatgttctataaaactatgtgttaatgaaatgaaatgtgactctactgggggattttaatacttcaactattccaagtcttccctctttcaatgtactctgtctcacattgtactctgtctcacttgttccattgcataatggagatgtacaaagtgaaaattgcctagcacattgtcccttctaagagaataatagaaaatctttgaattgctgagcttattggaatgtctgttacctaagaacaagtgttgccagtgagactaattgtgtgtgtgtgcgcgcgcacacacacatgtgcacatgtgtgagaaagagaaagtgagggaatgagagagggagacaatgcagtatctagtttatgtaaataatttctatagcatgagaacatcctatatgtttaactaagaaaagttaatatgactcctgacaactacatatacacaattactctttctatgaatatgcaattatgaaaaataagcaggttcccaaataatgtggaattcttagatgaagcgtgtcagtattggcacgtgtagcattttaaaagagtatggttctgttttatttttagaatgtattgaccttaatggaataaagtaccatttaataaccttatttttctcataggctggcatcgaaagggaaatctttctttgtttactgctgaaggaatatgaatctataaactttagcagtttttttgtttattcgtttttgtttttttgagacagggtctcattctgtcacccaagctggagtccagtgacatggtcacagctcactgaagcctcaacctccttggctcaagcaatcctttcacctcagccttctaagtagctaggagcacaggtatgcacacacagctttttttcttttcttttttttttttgtttgtttgtagagatgggatctcactttgttgcctaggctagtgttaaactcctgggctcacgtgattgacctcccaaagtgctgggattacaggcttgagccaccatgcccagccaactttaacagtttttagccaagccatggctaactaaagagtaattttaaacttttatttaaataaagtaataataagttgagtagtagtagtgttttgttcaaactaagggtgcccttctctgtttaaccatctcccttcctaataatctagtgttccatcccatagtactccaaaattaaaggcatcaatccagattacccagtgactcagcaaaatgagaaaaaatctcactggagtccagtgagaatccagggactaaatgccttgccatccaaccctatggtcatatgcaagtttccacaggtattcaaattatatccagggaaaaggatcaggggtggatagtggtaagaagacttctatggagtagaaaaacagccctgattgatagtataacctctaaattgaatgaatatatacctataggagccttttaaacagcagaaagcaggattttccctacttaacaaatatatgattttgttggttctcatgttagcagtagtaatggagggcagtggtgaaaagggttggaaagggcttggtggattggtggaaagggggactgcagagtttaaaaagtcaattataaagttagtcaactatataaattaaaattacttttttgtacttctgagtcaacgtatgtaactattggcccctataaagatagaaataatgacataactttattacaagtgtttcaaactagaaaaataataccagctccatctataagatttatagaagtataagtgtccagcatgggaggccaaagagaataataggaatggtgacagtaataaagggggaacaaagtccatcccaaacagaaatttaaatttccatgaatatagccaaaatttttaaagagagatcttaagaagaggaattgaatgtggataaacaacatagttttagaaaaatgtgaccaacactacagtgtttaactgtctggtgaaggagaaagaccacagcctaggctttcaagtgaagaagtgcctagtaagaaagacagtgacaatctgttataaaatagactcaaacaatcccttaatctaggtctttaatctagatggaaaatgtctgaatactgcacctggactcgccagctatttttaggatagagcgcaaggaaaactgtttttatcttgggacttgtattgatcctgatttaatggtttgtactccagggctcccagaaagaggtgacacttaagagtgacaagaggtaacataatttcctggtcttatctatagtttctatttactacagctctacatcaagggtcaggaatataaagaagagaagtggccattttcttaatccagtctatcattgttggacatttgggttggttccaagtctttgctattgtgagtagtgctgcaataaacatatgtgtgcatgtgtctttatagcaccatgatttatattcctttgggtatatacccagtaatgggatggctgggtcaaatggtatttctagttctagattcctgaggaatcaccacactgtaatactatgcagccataaaaaatgatgagttcatgttctttgtagggacatggatgaagctggaaaccaccattctcagcaaactatcgcaaggacaaaaaaccaaacactgcatgttctcactcataggtgggaactgaacaatgagaacacttggacacaggaaggggtacatcacacaccggggcctgttgtggggttgggggagtggggagggatagcattacgagatatacctaatgtaaataatgagttaatgggtgcagcacaccaacatggcacatgtatacatatgtaacaaacctgcacattgtgcacatgtaccctagaacttaaagtataataaataaataaataaataaatatatatatatatatatatatatatatatatatatatatttagaagagaagtggtttcttaggaagaataagccaatagaataattcctagattcttaaaacttctgacagttatattaaaacacttaacaatttgatctctctagaaaaatacctttagacattctggaagatgagaggtctaactgcagttcagttattcaataattcctaaaaagccaggtgaggtgtctatttgataaatttcttgaaaagcctaaagagttctatgaaaactgattagctattttctatttgtattatgaatgaaatagagaggaaaaaataatagataaatctccaggcatgaaggatcaacataatttgcatctccaattttcttctaccttcaccatctttttcctatttggcctacttccaccattcttttctgtcttaaaccagtgtcctcatgtctaccactggacttaaattcttaaagggctctgattttcctcctaacactgcttagatggtaccatcttgctttgtgtcaactcaggtagaaacaaggtttgacttttacaaaagaaactttcactaacatttaaagaaaaagttaaaagtactcctatattgaccaaactcttgaccggaagatagcagtatgactagcataacttgtgagatctctctgtcttcttttcttagccacaatcatctcttatgaccagattaaattattccaattgctacattgaggcagacatagactccctcccctgtcatattgaggttggtatgatttggggggtttattctgtttttatatcagaatgtctttgccagctctggggtctaatgagcttctggtctacatttatctttgactcatcctacattaccttgagtatctagatgaagaaggcacatttccatctgaaagaaacatctaacacagcacttatcattgtcatttgccctttctgaatattactgaactctagagttattggcatgccatattttcctggagtttgaatttgtctggtccagtctaaagaatcttcagaggctagttatttaaattaattgctaccagcaatactttacttttcatctacgttagcaactcagtttagcctcagagtcagttttttggtaggtggtctcaggcatgatgcctgtccttatcctcaatggctataagacctctcccattataaagccgttgctgtattttagattgtctgaggcctcctttagctctcatcagcttgataccaaggttttgctcaattaatatgcacacatattgctgctttttcctcagatctaataagtttaacttaaaacacttagcaatttcacacctaaataatcattttaaataatctaaatgtcttaggtgtttcatttattcatctttgttttaaatatcatttttaaatgtcctgaatggtactgcctagattttcttctagggttttcatagtttggggttttacatgtaagtctctaatactttgctgtatagactttaattccttctctttcatttaaataatctaaaatgtctttaatgcactctacctcgtttcctctcacaatcttgccatcatcctaagctttggcttgggcaaaaaaatatcatattttcttgtttggccaggttgtatttgaaatgcctgttagaccccagtagaaatatcaagcaggaaagcaaatatactagcttgaaattcactggattggtcaaaacttgtgtggcagattgtacttttcataatacccagaggtgggtctacctctcttcttaagtctgggtgggcttgttagttgcttgtgattacaagcaagtaatagcatggggttgaaagtgatgcatatgactttcaattgcatggagttgaaagtgatgcatatgacttctgaggctggtaagaagaggcaatgcaacttctgtcgtgttctttggaacactcatgctttatgccctgagataccatgtaagaagtgccagcactctgaagctgacatgctgtgaggaagccaagctatgctcatcagtctggcttagagtccaaacatgtgactgatcaaacatttagatgattccagctcctaggctgtgagtcactcccagcatgcacaccttctcaaagagttaagccattttccctgtgcccttttcaagctcctgacccacagaatatgtgagtatgataacatacttgttactttatgctgctaagtttgcagtggtatgtcacaaataaatggtaagtgactatctttcatcacacctttcatttcagtgaaagttggccagtgtctgcactgtgggtaccaactgagcaaaagcagattaagcaaagtagacttagaaggaatagcgagtgggccagaaggagcactaggagaatgtggtgttatgaaaatcagaagaagagaggctttgttcccgtgtcccctatcccctcaggatagtataggatgtcctgagcttgggagggatatattttttagtggtaagaagactaagagtatgactgttaatctcctcctttccctcaaggataggcttcagtaagggcagagaaaaataaaccactgaagttgagagttaaaataaagaaaacattcaagtacactttaaaatgatatttacaatgattatgtagacatcagatcattaccaccaccagtgtccagcagatgtaatttccctaattaatttacaatccaaatgatagcttatatctttcccattctctgaaaatctaggtaaaactgactcaaaacttcttcctaaaattttctggactttcagaggcttttgttctcatagctacctctggattgctgctttttcatgtgctatctctgatttgaatcatatctgctcagatgtggaacacggacttttcaatttacacattcactcatacaaacgaaaaaaatggaaggaaggtagaagaggaattgaaattataacaatccaaacaactttgagtagaacagtagacactatcattcttaacagattctttgtccatcacacaatcagtgtcttacaatgacctttcaccctacacaacttcaaatcatctctctggttgatctgtcttctctttctgtcttccttcctattcactcactcttagaaaactcaatcaaatccaaattatttcttacttctacatagaaatttttctttcaaggggttcaggaaacaaaaatctcttccataggagttgttgtggttatgaacagacagaaaagaagctatgtgcttactttttactcatacttaatgtttttttccctaggttttagttgatctaagtgtcccggtatgttgtcttagtcagctcaggctgctataacaaaataccatagactgggtagctttataaacaaaagatttatttctcaaatgtattcagttctggagggtgagaactccaagatcaagacactggaagattcattgtctagtgaggatccactgacaggttcataaaatagcatgtgtccttccgtggcagaaaagggaagtgagccctctgtgttcccttttgtaggggcactaaccctgctccacccttatgatctgatcatcttccaaaggtcccacctgcaaatactgcagttctctgggtggccttggactgacgcagttctccatcctttctcaattgtacctctcaagaattaagtgtagaatgtgctggcaatgcaaaatcttgagataaaggggtgctagctgggacagcctaggctttgttccagtctcccttaggataggatagaatgtccttcagtgctttagctcagcatctcatgtgacatcacagtatgaaacacaggactggctgctttttgcagtctctctgctaatgtgcaagtgggacatgcatagttgagattctatgcaccccagccagctttcctgagccttgggaaactggctcaccatgaatcctagcttctgctatctcttgctgcctatctgtaagtagcaaatctgcttcacgtaatttgttgtgtgtgggtgttctgtctcacaagactcagataagttggtagccagtgcacactgaacctgcttcacaaataccatcacatatcatcacattgggtgttaggatttaacatatgaattttggggggacacagacactcagtctatagcatatgtgttctgacatttatgtatttgaaaatatctctatgtttgcttttatgcataaggataacttgactgtgttttgaatttttaagcaccatcattttgtttacaactctgtggttgacactcctttctttctctcatttagtgtcataaagaagaatatttgaagctctataaatatgttgctttacgtggcaaaaaggactttacagatctgagtacactggattatctgggtgggcacaatgtaatcacaaggggctttctaagaaggaagaaggagggttcaaggcagaaaaaccggaagaagttataacattggctttgaagatggaagatggggacacaagtcaaggaattcaggtggcctctagaagcctgaaaagtcaaagaaatgaattctcccctagagcctcaagaaggaacacagccctgctgacagcttgattttaggatttctgacctccagactgtaagagaattaatttatatcatataagtcactaagtttgtggtaatttgttaatcaacaatagtaaattaatacagactacctttagtttcataagtaaaaatatcctctttaattgttatttacatttatatgaatcaaaattttcctagaaggattttctgcttatcacagcaaatttatttttaaaagaaggcaggtttgattcttcaaagaagctatgtagtctaaactataggatctttcctgaaatctggtaattttccccagtttggtcatccacagagagccatctgtgctttccctgtcttgttttatggccaaaaagaaatgggcatggtttctgttaatctgatacaatttcctactagaatatatcttgtctagatcaactctttcctttgtcatagaaataaaataactcaagctcccatgcaatgtaagtacggataatccagttgcttcccaaataatttctgaggatcctaggtaggtgcttacaaatgttagtaactacttgccacctctcactatgaatcattctcttcttagtagctagtcttaatatatagataataccatgttattttcttatttaaggaagagtgggttgctcattttacttaggaaaaagtcaaaaatacttaaactcacaaatttcagtatggtctgttctttgcctacctttcagaatcgttttctgctaacacctctcacagttgttgttttggggccttagcaaatttcttcccacctcaggacctttgcatatgtccttttctccatgaaatgttctttctttcccagtttgcccgctaccgattcctcatctttcaggtcttatttcaagggttactccctcaaagtgttgctcccatgatcctgcctgactactgaaatcagctcctcctattatggctcctaatagaatcctatagtttttctcagtgattatttaacaactgttccttctacaaggctctaagttttaagaaggcagggatggtttgttttattacattctccctcttcagtcaagctcaaagaatatatgagtgagtgaatgaatctgaattgctgtttctggccattccatcttaccctctgttccattccatcaacttatcttggccttagggcatgagagcatctctcatctttgttcttcattcctcaaggcagtgctaaaggaaggctgacaccaggttccagaggttttttttaaaaaacaaaaaacaaaaaaaaaaacttcacttattccttcaaaatatttattgaacatctgtacactaggtactattctaaacgcttggtggttcactcttggattcagtggtgccaggtcattgccccatgaggacttgcaaacatatgatatagtccaaacgttttagtcaacataaatgaggctgtgctcctgatgacatgatgcctgagatttatctttagccctaatacctccaaatctcaaggtgtgttggtattaattggttagtatgttctctactgtattatgggtacattgctttcctagaagaggatgtttgacatgggtactccatgccttccaacagtataatcctatctgtattacttttaacagaaatgcccccaaagtttcctgcatatggccagtattcatctttcctttctgttgctaccatagaattattttcctctttcccccttaaaaatattatattggacatttcaatgggaatttgggagcagggagataaaaacctgctcttatcattacattacccagaagttttcagagatttcttcatcagtctatggtctccttactctctgtttcgccttttatctatttattagtttatttttgttatgagttggaactggattccaggaaagtattatgtacattaaaaactcaagagtatctatgtagcatgaattattctgtaacagattgtccagatagtttcagaggaacatttcatgactcgagtaacatttgcatttcatagttgattgagtagccttatgaaatgaatcagcactgtcataaatacttcgcactattgactcactccaatatattgacatttgaatgttcattacccttatccaatcaattcaacattgctaactttacttctagggcagaagatttttgtagccttcttctatataatttggaaggagagaagagacaaagctccatgatgtatgaaagggcagtagaatcattctattttataagtgaattgaagtggcatcagatgagacccaaccacgttatgtgtgaaaatatgaaataggaaaatggggataatatttgggtataaaatgagattactatgtaaaaaacactgtcctcaaaatagagttgttcttttgaactatataaatggggaattatcttagaagacagaacttccgttactagttatggttgttatccattagaaagacttcttaagagtggcttataagcatcctcttaaacatccttgaaaaacagtaattttttttcttatatgtctgagatagctaaataaagcgtggtcttttcagaactgagatcaacataatataccattaattttatctaattgcttattgaagtggtcccaattgtatgacacttttttctcacctaatatatctggtagataggaagtagaatagaagcagtattgtatatccttttccaccaggaaagggagtatttttgatataataatattactttgggctttctatattgcaaaaaaggaatatatattcctttaaactataaagtatctatattctatgtagtactaaattaatttcccttaggatctttttaaaaaaatgaatgtggtgaagaggcagtgggcatatcattaatttcatttcatagaaataacacaaatgaatttttctttgttgtaataggtaaaaagtaccataggtctaaaataaagcattaatctactctaactctttctattctatgtgctgagataacccaatgtaatcagtatcgagatggtatatgccttccacaacttttctatgttcaaattaatatatacagaaatactatgtaaaaccaaaaaaaatgtagtttagaattacagtaatcaaaaaaatatggtgttggctaaagaatagaccattctcatatatatcacgctatattctgtgtggttatcacacacaagtagttagtgtcagcctcctgctcaagtctccagtgattttctattgtctatagtagtgatgtccaacataactctctataatgatggaaatattttataatctatactgtccaatagggtagccactaggtacatgtggctaaggagcacttgaaacataactcatgaagccggtaccgaatttttcattttgcttaatcttaattttattaattaatttttttttgacagagtctcactctgttgcctagtctggagtgtagtggtgcagtcactactcactgtagtcttgtcctggactcaagccatcctcccatttcagactcatgagtagctgaaactataggcatgcaccaccatgcccagctaatttttgtattttttgcagagatagggtctcatcatgttgcccaggctgatctccaattcctgggctcaggcaatcctcctgccttagccttccaaagttctgagattacaggcatgagccaccattcccagtgtcttgattcgtttaaatgtacacggtcgcaggtgtttcatgacttccgtgctacacagccaaggtctataatgtcaaggctaaactctttatcaagtactcaagatcctatataattttagttgagacaaactgagctcaaggtctataggccctaagaataaaaactgaaagaccttagaatctgtttattttctatgggaaagggggcaggtggggtgaggggtgcagaagtaggttttgactcttgttccataaatatctgcatgtttgcaatgaaaagcttaaagaaaaaagctgtttgtggaagacacagaaacaaaatcccccatttttcataaaagtgttttaaaagatgtgggccaataccttcctactcaagagtattctcaggattgagaaaattgaggaagtacattcatatctaaggagatatttactatgctaggttctttgccatcttttcatttaaaccttacaatactcctgcaatatgtctcccttctttttgccaataaagaaactgttttcagaaaatgatcaaactgagtagaaaaatgggtagagctatggccaacaactaattttacaaagtacaaatgcctaataaacaaatgagaagtttcttaaccttactagtaatcagaaaaataaaaattaaaacaacacaataatttgccatctcattgggaaaatataaaagactgaaaaacaggcagtgtagcaagtattcattcaacaagcatttatttcattgcctgctacatgccaatataggaattagaatatgacaccccaaaatatgccactttgatataaggatgatttggagctgaaagcaattgaggagcaacattgatatggtttggctctgtgtccccacccaaatctcatctcgaattgtaatcctcaggtgttgagggagaggcctggtgggaggtgattggatcatgggggtgttttcccccatgctgttcttgtgatagtgagtgagttctcacaagatctaatggttttataattggaggtttcccctgctctcttttctgctgccttgtgaaaaaggtacttgaagtttcttgaggcctccccagccatgctaaactgtaagtcaattaaatctttcctttataaactacccagtctcagatattccttaatagcagtgtgaaaatggactaacatgagcacacacaggaagaactttccggcctcctcctttctgccttacagtggtgtataaattttcctttgtaaaggcaacacagattttcatttgtaaaggtgtttttctctccagtcccgagtgtaggataattattcttatctgcctaacaaaacttactaaacaagccttatctaccccagatttaccagtctctgttccatagtttactgcccctaggagccctcatttcttttgtctagtcacttctccataatatatcacactttgttaaaatggtatatatgcctacaagtctaacttctttgagttttcactttctttctgtgagaccctatgcacataaaaaaatttagcatcaataaagatacatacaccttttttcctgttaatctgtcttttgtcaatttaatatgcaagcctcaaccacacaacctcagccactactacaggtgctgatgaaataagactgatcaacattctgctttcatgataatttggaataaaacaaaaaaaccctaaatatccatctaaataaaaacgattaaatgatgatacatctacactatggaatattagaagacatgtacaactggaatatgataaaatatttatatattgatgcaggttggggaagccacaatactattagttgataaaaatcaagatgtgaaacagcaagtaaggtattatctgatttacgtaaaaataaaacaattttaaaagctattatacaacctacatcatcctggccagtttataccctcattttgaaaagatcctcacataggatcatattccaagaaacaactctcctgcagccaaagataaccgaaagcaatgtgcatcctaattgcacttcctcacaacattgccaaaaggggaagtacattcaactcttaaaaatgctctttttctttctctttcagtctcagttatctcagagcagctgttctccacaaaaaactttcatattcctctctccttattccctaaaaatttctcctacatccaataggattgaattcttgtcttttctgtttctcctctagccttcttaattatttttctccctagcatttctttttatttcaatatgaatttcctggcttcctgagatcactccttgtctttccccaactcattaccccaataagcatattaaagactcaggatttagtgactaattgtttaaggatgggggatcatgactgatgactggagagggggaaaatgtgtttgttatactgttaattgaaaaaagcagaataaaaatattatatacacacaatttgagtataactgtggaaagcatataacctaaaaccttttacgggataaaaaataaaacactaaaaggaaatgcactaaaatgttaacagagagtatttttaaaaattttttatgggcaattccccctctataattacttcttgatattttcttaaatatttactataagcatgtattttatttttatttattttttatttttatttttatttttatttttgagacagagtctcactctgttgcccaggctggagtagtgttgtgatcatagctcactgcagcctcaatctcccaggctcccaatcctcccacctcagccttctgagtagctgggaatacaggcacacactaccacacctggctaattttttttactttttattaataatttttggtagagacagggtctcgctatgttccccagataagcatgtattttataataaatagatttaaatattggtatatcttaaggaatttgataattgtgtatctctcagctggaatctatatttttcactcatttctagatccacagacatctgagtgtatttgcctgaaataacaaggagtcttcagtgagataactcaatataacaggtaacagaaggggaagtcaggaagactaggtttgtccaattacttttatgatatctaaagaaaaataaatctgaatataacataatatctttcacttgtcgtgtccactagctcccaactgcatgcttaggtcctgaaattggcagtgagacttagaggaaaacctaaatacactgtttacattaaaacatttgttagcccctgtagtggaagtagtaaagcagtaagagaaattgtgacccaaagcgacaagagaagcctttgcttctgtgtggaccacaacttggtttaagtgtcttaagggctgcagaaaatccaggtccattttgatgccttgcaagctacagaatgtcagagatagagctgtgtggaagaaggcagctagcaacattagccagatacttccacctagttcattaggtaagctatgtgtcaacagtagataccaaccaaaaggttcacagtaggagagacaaagtgatggagcacatctgagatagtcattgggaatggtcaggaatatttggggaatagaaggttcgttcaagacccttagaggatgttgttgcaattgcatgaaaggtaagcctaaaaacatgacttacatgacacacaggaaaactatttcttacttctcctctgaaggtgtcaactctattcttattgaacattcagcttctgcttaaaaatcattcggccagctcctcttctcctccttatccagctcatgtttttggttactgcagggatgttaactgggggggaaaaaggatgtagagtgtaaatatagtcttatagttaaccttttatggtgctcgtatttggggaatggacagggtaagaatcataccacttttggctagtcaatatttggtttactacattcaattgtttgagagataatctgatacatatttacatttacattttgtttggcagcagggttctacaaattaatatgcttaaaaattttttattgagccttttgactataaatgaaaaataaaattctaagcccccgaactaactgaatggacccctcttttcagccaaggacattccaaagttaactggaaacaccagttcaggccatgatggaaatgggtggttgggtatgcataccctctgccctttgaaattcccacacaactgaccagcattaatattaaagcacagacctttggactgacgagacagactttttgtagcaataagataccaacatgacagataccaggccctgaaaaaaaatgaagcagtttatccccaaatatatttctttgacatgttttgaaatggccctgcaaacattctcttgtggaaaaaatctacattctgtagagaatccccttccctttccaagtctttttcctgatccagaagagaattaactaagaatctggcatctttttaagtctgataagaaacatttaaagtctattctctctgaagcctgctacctggaggctccatcagtaaactaatacccttggtctccacaaccccttatcttaacccagatattcctttctgctgattccaggtctttagataaactcagaaaatctttgaatccacctatgacctggaactcccccctcctacccccctttcaagctgtcgggcctttccagactgaaccaatgtacattttacaagtatcgattgacgtcttctgtctccctaaaacatacgaaaccaaactgtagcccaaccatcctgggcacatgttctcaggacctcctgaggctgtatcccgggcatgtccttaaccttggcaaaagaaacttctaaattgattgagacttatctcagatactttttggtttacatgacatattgatatgacattttaaattatttttaatattctaattcttcatttatatagacaatgaagaattatgtcatttggatgattaagtttatactttgtaatgatcttatatgtaaagaatgcagaggacatagatacttggtctgattgtttatctaatgggcttggaattccatttacctgaattctattattttcaaaattattaatttcaaaatttctatgtcaggaactgcttagctgtttagagattgtaagtttatgagtgcaaatggcctcctgatttttacagaacaaaaatactagctcttctttggcaggcaaaacacgttcactgatatgatctccttatctcactttaaataacaaaaattggctttttctgaatgttttgtctatgcatcatctttaacattttaattgatttgaaatgatcttggccttgtaaagtatgcttactaaatggttgggtttttctttttctttttaaccagtgtaagcattttatagcacccagttctttgaaaagcagaacgcatgccatacctacaagttggcatacagccaagaaagtccttttgtgtgcgtgtatttgtggtgaatcattcatagcctgtaagatctatcaaaatagctttgtttgaaaacctagttttccccatattttttttctgatgactcacacttcactgctttcatgtctagattctcttttctttcttgtttctcatcatgttcattcagaagatgttctttcactagttccaaaatttgtatttctatattctgtcagttttcatcttgaaacatacacacagcaatatgctctgaatcataaaattctgcattaaatcccaacacttaaaaaaaacacatattctcaatataggtttacctgctcctgttgccatttttatttagtacaaatttattaacatttaaaaatcattggcacttatgaaacttgaaactttattttactgttaggaagattttggctgcaagaaatataaaaaccaatgctaagtggtttaaatcataagaacacttaacacttcatggatgaatatgaaaatatggtggttcaggattagttgaattagtagttcaataatggcctcaaagactcaggatcttcctatctttctcttttgccattcttttaaatcgattttattaaggcataatttatatataattcaattttaagtgtataactagaggaattttgacaaatgtataataatgtatctattaccacagtaaagaaatttaacatttgcaacgtttcagctccttgcagtcaatcccagctcttcgatttcgaataaattattatattatatatactcctttgtgtcttcttttacatagcattgtgtttttgatattcatccagcttgttgactgtattggtgctttgctcctttttattgctgagtgatagttcattgtatagtagatatagtataatttgcttattcattcaccagttgatggaaatttatttccagttttggctatcacatatgaagctgctctaaagattcccctacaagtctttgtgtggatacaggtttagatttatcttgggtaaatatgcgaatgctgggttgtatgttaattatatgtttgacactataagaacctgccaaactgttttccagagtggctgtaccatcaacagcaatataagagagttccaagttgttccaaatccttggtaacttattagtattttttgaaaagcaaaagtttttcattttgatgaagttaaattgtcaatttcttcttttaggtttccagcttttaaattttttatactttataagtgcacacatttaaagattatatagagtttctgctaggttttctctaaaaagtttgagatttagatcttgtatttagatttagctgtatgatcagtttcaagtaaatttttacatggggtgtgaattaagggttgaggtttctttctttcttcttttttttgtatatatggatgtctagctgttctaacatttgttgaatattctgccattcctggggctttagattagtactttttcccatctttgtggtcacacgatgactgcagccattttaaccatcacatcagagactatctcttccaagaatgtgtccagcaaacttcttttcacctcgttacctagactcagcacatgcttattttgtactgtctaaaccaatcatgggaattggaatggggccagcatggttcatttattcattgaagaaggaaatggttgcccatatcctttctaggggttggggatacagtagtgacgaaaacaggcaaaaatgttgcctgacctcatgaaacatacaatttactgaaaaagattgtcttttgtcaaaataaataataaactgtataatatattgctgtatagcagtaggtactgggaaaaatacagggaaagaggctacgaaatattgtgggtgagctgaaatttcagataggatgtttaggaaaggtctcactgaactgacttttaaataaagacctgaaggaagtgatggagcagtctatacggataccaggttggagagtggtccaggtggcagtaaatgcgaaaagttcttgagaacagcaggccactgtggttgaagagagtaataggacattggggagtgggagtgcataataggtagatcagtgttcttttcaacgactggcaattttggcaaaatttcgtcatgttgggggatattttggttgttaacttgtgtgggagggagtgctgaggagaccagggatactgctaaatatcctacaatgcacaggacagcctatctctcaatcctcctccttctcccaaacccccaacaaagaattatccaggctgactgtcaatagtgcccaggttgagaaatgctgtttaaagtcatagcgaagactggctaattgtgagtaaattggaataacactgaattgttttaagctcagtaattatttaagcgttaaggatcatgtggctgcttgctgtgaacagactaaagggataagagggtataaaacatttaggagggtaatacaattacctagagaaaaaatatggtttgggccagaatgcaggtaagggtgctaagtgatagatgctggatgtattttgaaggttgagccaacaggatttactaacactggatacatgcctgtagggagaggaaccacctacaagtaatctgctgtggttgctactggagttgtttcttctcaaaagggagccggggaagtggtggaaagctaaacaaatttggaaaggaggaaagagtacccaatatggatattaggattattatgcatctgttacataaatatctgtaattatgcatctgttatataaatatcttaagaaaataagaaaggacactgttggaccagtgaatgactaagggcacaattattctatggactgtttctttaaaaatacttttttgtttgtttttagaaacgtcttctcatgccatctttcattttggtgacagtctgaaagatgtagggagccccaattccttattctatcaaagtcattaaagggctctaattttcctttcagtatttgtatcccaaccaattattggtggttactatgtagaatgctgacgtattaataatctttgtctaagcatttgtttggtttagtctaaaatataagcttactatgagtcttttttttctttccttcgagactgagtttccctcttgctgcccaggctggggtgcagtggcgcgctctctgctcactgcaatctctgcttcctgggttcaagcgcttctcctacctcagcctgccgagtagctgggattacaggcgtccgccaccacgcctggctaattttttgtatttttagtagagatagggtttcaccatgttggccaggctggtctcaaactcctgacctcagatgatccacccgcctcggcctcccaacgtgctgggagtacaggcgtgagccaccgcacctggccactatgagtctttatgtattagaaaactgcttaataaagtcctcaccttattgtcataatcttataaccaataaccttataatctaacaacaagggttatttccatttcacagacaaaaaaacctgaagtttgttaattacggtgttaaattatcctacgattaatggcagaaataggtcctgaaccaatatgcctttgagaacttaaacgcggtgagttacatacaggccctcctaactggagtcttcgctagtaccaatagttagttgctcggcgagagctcggtaaggactagccatttggaagctcgtagtactcaggttgtggtacaggagatctaacactcctacacaaatgcatgtcgtgcttatttcgtaccaaactggtctggcggcggttcttcgtccagacgctggcgggccagggtggaggtagtaacacagctcccattccccatgtagccgcgccctctccttcccctgggcgtctccggggcgtggacaggccgctgaaaggaaccggctgcggcctgtgtgaggctccgcgggccgctgcactgcgaggccgacgcagctggagagaagttaggcaggtcctagggagggcaggctcgagtgctgggcccgcctccccgcgggactgtaggcccgggggctccgcctcgtcgcagcggcaggtaggaggcggtgcgcgcggcccggcgacgggggatcctgaggcccggtcagtctcttgctctggggtcttgggtggcgggcggcacctccgcttgcagtgccggagccgcggccccgctcggaaaagggctgccgtcggagttagatgccggggactccgggccgtcccagcccccgggcctcagctccggcccgggcagagtcgctgcttccgcgtttggttcttttttccccgctgggagtgagaacaaggcgtccccttctactcacgtttgccaaaagcgggtccgacgtgttagcggaaaagtgggtggagtttctctttttgccggtgcagagagaacttgtggcgggaagttggggcgcggggttggccgtaggtccccggcgtgctaagggcggacggaccaggcggctgggccgcgctgcttctcgttaccttccgcagggtcaggggccgcggcggggttggaggtcagcccaggcacatgttaacccctgggtaccagtttgctcggaaactcgtgttgaggactcatcttagccctgggaaggtacccagaagccgaagggacacccctgacagggacgggccctgagaggctgtcgtttcccttggcagatgaactcgggactcgcccccaggatgtacatttcgtagagtctcccttaccgcctcaagccctgaggccgctgccttgccccaaagtgtatttatcttttttataattatttagaatttattccttaatcagtagtttacactttggagactttaagttttaaatcagtaaatctgtaataggcaccagcctatataatgtactggtcaagggaaacctccacaaaaacttttcctgctttatgatacaatcaatgctctaggcatagttcaccatccaaattcccagcccttgtgtgcctatcaggaggaaggtgaatattgttaaagatacacgcagcgactctacctgggacaatactgctaagtaaaaaagcagttaagtgaaggaggaaaaacccgttaaaggaaaaacagatactttcttttatggaagctaggaagattatattaagaaaactttacatttacgtatatacgtttttaattaactttcatgtcagaaactcttaatagttttaaatacttagaggatcatggttaccttcacatttaaattattttcaggcatgtatgctggcatatgtattttcccctaagaaattttctcttttaactcagaatttcccattgagaaatttgctaacctatgtacaattataattagttgattaaagttgcatggctgtgctgtggagattatgcttttgttgttggtggcacagttgtaatctctaaggcaggactgttttcactgtgataaactgagaaagagggtaagaagacaaaatgctgagaatattttggcagcccgagaactgatggcctagtattctgctaagttacatatccgtgaaaatccctggctcatttaacaaatgtttactgagtacctagtatcacggtggtgagatgtccattgccattgtctgtgtcttcccaatccaatcctgtgttcttttctagtgactgaagaccttctcacttttaacattttacattctcagtgacagcaatatttccatgtacatgaaatttattttctttcttcattggaaattgttaatttcgtgtttcttaaggtgtgtcctgcactgttaatatgtgctatagaaccccgaaatgaattttggatgaaatttggttagtttgcttctgtttttttaaaatatctatacctcttagatctcagtattgtaatgtatgtgaatttctaatttgaatataatgtgtgggcttttccaaactgaattaactttagaatcctaatttctgggaacctgggaaagttccctattgaagacattttgggaagtgtattttaagagttttgtttgtttgtttttctttttacccatttatctcaccccttctgccaacagaagtgatgccaccaaaaagaaatgaaaaatacaaacttcctattccatttccagaaggcaaggttctggatgatatggaaggcaatcagtgggtactgggcaagaagattggctctggaggatttggattgatatatttaggtaaagtaaaaccttaaattaacaattattcttatatctgtgactgtaaccgtgattacttagtggtattttaagaatggaaatatggaattcatatgtgtactttattaaaattcatgattgtactcgattaagtaataatagagtacagtgtctaggttcaagacatcactgacccactccttgttgtccatgtttttctgagtaaatcttagaagtctttttagagcataattatacaatctgccagacaaaatgctaactttctttttttttgagagcttgttttcttagaaacatgcttttttcagatgagaaaccacaactgtatagataaaaacactttctgtttgtgaatcttaatcaatatttaggcaatacaagagtctagtcatttcttaattgggctctactggagaattcatagataaaacttaaggcatctattctgtgaaatgaattaacttctctctcgtgcatctagagtggtccctagggatgtgccattcttgggataattgaaaaaataaacactcaaaattattttctgtgatctgtggtacaggtaaggaaccatgggctggataggcctttacattgcatttaagcatttaaaaattacactgaactttaatggatcattgagttggaatgaggaggggatatccattaaaagattgattaataaaataaggaaaatagtagtgatttttaaaaatataccctcaaggataaattctcctaaatgtactcacttgagacttgagatcacatctatttctataggagattaaggagttgataaaatacctccgttgagggaatcttgggttctcatcacatatttccagaaaaacatgcttcatggatcctgaaatataaaagatcctcttctgataaaattaagattgtagttttgaatgaatgaatgaatgaagtttggtcaataaatatctgcttattaaatacttaagtgtctattctagttggaaagacaagatcagcacaaaaaattgtatgagtcaagtaaaggacccatttaaagggtttgaacttgcttgaaattgcttgaaaaaatactatggttattaagtgctagattgaatgacatagtcaacactgttcaatagaaatgtaatacaagttacatatgtagtttaaaattttctaggagccacattaaaatacgttaaaagaaacaggtgaaattattttaataatatttaatctagtatatcaaaaatattatttcaatatgctctcaacataaacaaatgaaatattttacttttttaaatgaaagtcttcaaaatccaaggtgtatctagtctcaagagcccagttagcccatgtggctcatatgctcagtaactacatgtggctgctgtatagaatagtgcaaataaagactatgtgaggataagtattgtttgaaacttgaacttagtgaattctcttttacagcaaagagttaagatctctagtatactgtcttgactcaaggttgagatatagtgttgaataaattatttctgatgtggctgagctatagccttgaattccatagcttatcacttttggttttctaatatttgtattatttgagtaatttcaaagaactagagaaaagtattgatgtgttgattttatctctttgattttcttgaaatgtaaatattatatgtatttaaattcaagtgaatgtttaagattaaatagtgtatgtctgtatacctgtatgtatctatgtgtacacatagtcactattgttactgttatgataaaggaatatacttgcataggcatgtgacttacttgtccctattcaaatgcagaaaaatatttgcttctttcagtctagtacagtgtcacatatttttactttttttttttttgagacagagtctcgctctgtcacccaggctggagtgcagtggctcaatctcggcccactgcaacctccacctcctaggttcaagcaattctcatgcctcaacctcccaagcatctgggactacaggcacctgccaccctgcctggctaatttttgtatttttagtagaaacggggttttgccatattggccaggatggtctcgaactcctgacctcaggtgatctgcccacctcggcctcccgaagtgttgggattacagacgtgagccactgtgcccagcctacttatttttttttattaccaaaataatactgtttgttttacaatatattttcagggttcaatatgtaagggaacattctctagtatctgaactttagaacctggaccctacctaggaagattagcaagtacacaccactgaggaaggactttaaagaaatatttagctattttcagaaaaaaggctccagtacttcagaatttataataaagatgtgtgttccaaatgttgtaactgttccattaaaagtgatgctaatgaatcatagaatcagtttaatttcactaaacttagtttttactattttcaaagctatacaaacaaatcaatatgaaattacatcatgtttttgcattttatcatggttctcatcacttcctctatataaatgaagagaagaagcagtaaaattcaaattttcctgaatacttttgtgtccagtgacattcatttcgattctttccagataccctctttcagcagacacttgatcagcgtttactgcctaaggctgagaagaaactagctgctctgtctagctcattgtacatgtacaactgtcctctagctttgagatcagtagccagggcctttcggtaatcagcagcttacagttaaggggaaggggcagagaagtttggtatttactcttgacttggagaaataatgtgcctctagcattaataagaaatagctaaaagagtgaaaagaaaagtctgaatacaagaacaaagtcaaagttctttctttgaatatgaaaagagaaggggaggaaaaaggaagaaaggaaactggtttaggggatgggaaaaattgctgtcattttagtatcaaatgaatgaaaaagttttttaaatatcaggaaggagagaaaactgagggttagaattttactataatgctgggtataacacagaaccaagtaaattacgggagaattgcataaataatagcagaggttttggcattaggcatatctgacctgaatcctgacctgatgaagccacttattcatctagttacttaatcctttgggttgtttctattctgcataattgtgataataataattgtgaggagaattaaatgagatttttttaaggaacttggtaagcatttaataaatgtaatttagttatttatttccatagactttcccattcttaatactggtgccatagtggggccaggcacagtggctcatgccagtaatcctagcactttggaaggcccaggcgggtggattgcctgagctccatccagcctgggcaacttggtgaaaccccatctctactaaaacacaaaaaattagctggttgtggtaatgtgtgtgtgtagtcccagtactcaggaggctgtggcatgagaattgcttgaacctgggaggaggaggttgcagtgagccaagattgcaccactgcattctagcttaggtgacggagtgagactgtctcaaaaaaaaaaaaaaaaaaatgctgccatagtggattaagatgatgacaaagaactccattggaagggtggattttctatttattctactatgaattttggtggatttaactactaatgtggtaaaactgagaacatagagaatgtcagcataagactttatgacattttactaactgataaaagctccccctaaaatttgctatagtagtgaaaagttctcatataagctgtatttaatctgcctcagatattaaagctattggtttcagaaattattcaaaattgagaataacagaattacaggataaactttagccacattcttttgaaggctgattatgtaagtaaaagatatgatttatctgtagcagttttagttttttgaaggtggcatagtgatgaccatttagcatctttggagtgtcaagcacagaatagatgttcaacagttatttgcctgagaaattgagactgagattggagtacttaacccacacaagctagtttgctttgttctcttccataattatagatgtcactcttcgatctactgcagattagtatccttagtcaccaggaaagttgagacaaggcacctatcatgacatcatctaaaagaatgtgcatgtgctttattgacaggacatcagtagcaatatcttttataaagatactatctcaaagcttttataaagaataacacattattataactaaagttaactgtggtgaagcctgaaaatcagatcatttatccatggacagatgtttaaatttcatcaaagtgactgccagacatttttggatcatgttgtcggattagcctaattttgtacttcagaaacatagaaggaatcttttgttggcggataggtttttagaaattaccaaagtttaaatcatttattttactgataaggaaacatttatatttaaaacaagtaaatataaaccacatacatagaatgtttttacttcttcataaaataattttttattttctttataaatagtgagctataatagattgattttaaggtatgcagaataaagtttagaagagcccagtgataatactagcaacaaagtagtgtgttggaatacatattgcttcattacatattacattattaagtgttattttggtagtgtttatagagagctttgagataaatagccttatctgacacaatgcaacgttgtggtgccactgcaattgttattaggcaattttgcaaatgatactgtgggagtgaagagaagaattgaataaatgtgaaaatgagaataatttggactagaaactatagtgtttatgataaattagtctccagaaggtataaataataggtaatataaactcaaaacagggaaggaatcacttggagttttgtaaatttaatacgtttgttggacttacagacaagaaataaaagtctctataagatgtattttaattttgtttatatttaaattttgagtttttaaagagatagcagtacccagttatctatcagttaagaaatctgggtgtttaagaaagtttgggttccttccattaaaagggagatttataagacttggcttttgcttggctttttcatttttttaaatatccatttttaagcatattttatattatggttcttctttattttcaacattttactgtcaaattcttttgccttaagggaagatttataaaatactctattcttcagtgcatttatatattatgtctcttccactggacctgttactatcttgtaactgtttacagtggtcaaggttttttttttttaatttgaaacatattgctgtggggaaatttcttcttcctgaaatgagctcacctctattgccacacaataaaagaattctcagcttttgagagctctggcttccttatgaaatatggatagacttctgcttctgaagtgttttaggtttttttctttagataaggaagaagaggaataaatagtatgaggtgtgtttcttcttttaagacacaggaatatctatatcagataaatgagaagaaaattaagaaactttaaagctctaaatgagagagctcattagaaattagctacttggatgatgaaaatttcttcatcatctacacttaaaggcatttatggtttttatactacttagatacttgattttgcaattagtatttctttagaatgtttgtccctgatagctccatcacatggactgttattcctgaacactctgttgtattctccatgaaaaaatattttaggagaaaagatagaaaactcagcaattatttcaagataattgttgaggacttcccttgtttcttttaaaagcatagccttttgttagccaggtagatttatcttttctttaacatcttcgatcaagtaatacttgagggaaatattctgtagaaagacatccattgaaggccagaaacatctacagatgcaatgtgatcccaagcaatgaagcatgtggcccttcattggcattatatgataacaggaggatcttctggcagaagaagtgacttttgctgcgttctgcatgctgcccctccaaacccatctttgattggcacctatgccctattgaaactggcatcacaccttctgaatgggcacagtgccaggctagcagatgggtatgggcaaaagcatgccagaaacccagtatgtgaatcaagtttaagtatcaggggcccaaattcccatccagggatataaaaactacagtctgttgagagctttttgtgcttaaggttaaaggacatgccatttctactccaacttagaagttgattaattttgaaagtcaaacagcagctcctgtggctgtgtcaggcaaaatcctgtctttggtgaatgagaattactacttcgtgtagggaagagaaagtattgtaatgaagtttccaatgagagttactctcctgcaagtgcctccagcacttaagcagcatgcattcagtggagatgaatatttctgttctccagcagagccaggtgcaatcaaagccagatcttcaacctgctgcagtaaagaaccctaaatttagaaagggcaggcaaagtttagaagaactccttggtggcaggcagctcttttcactatgagctgatgaagcttcacaaaattgtataaaggagatgaagggaaaactccaaataaaagaccttcagaaaatttcatccagaaacagaaagatttttaacaaaccaaaggaaaaagtttagtcctttctcctcaatgcagaaaatcttctgagttttctatcaataaaaacttagttaaccaaaatgttagaaccaacttaatgcataagtgacaaaactttctatttttacatttatttcattgcatgtctatcatgtatataaactttgcttcttgaataatggattttgcataaaattgagaactctaaacatcatatttccttctgattgtctcacacccactacagaactcccctcccccaccccctaaaagagggcacgcttccttctgatcactttaatcatatcttctaaatgctctaaaatttacaggaatgcctgtaagaccagctgtggccaagagaagcttttcctaatcgccttatagccgttgcttttgctttttcactgtgtaaactttatctatggaacagattccatgagaccgttgtgaatacttcaacgtattcaaaacatataactgccacaaattaaactactaaaactaaagctggtgcattgtaactgccaagtaaaactggcacgtccctctgtcagactgcaggagagtgtgccatacagtcctcggaaaacacaattcatccagaagcactcttgtcacttgctctgatattaaaccagagaaagtgacattaattaaagaagtgacatgagccaacaaaggcaatgaattctcagctttggctcatgtgcagaccttaatccaacctgttctgcttaggtagtgtggctatttctgaagagtaactagtgtggctactcaccccacttcctctcatcttcccattctgcatcacgtgtttgaggaactaacattttatatccagggttggactggttaattggtacactggtagtcattgcagggcttcccaaaatagtagtgtggtggcatgtgatgcttttattgtacttggtaatagtgtgagatgtacaactagaggtagaggagagttggtctaacgaaaaggcaagcaacagccaaacagcagaatacctagacttggtagactggaagcgaggagggtctgctgctaggactggttgtggaaacaaatggtggcttggtaggctttatgaaaattctgaaatgctaaagaggcatgctggggagtgttcataacttctctctttctttgttccgatggtgtgctttcacacaatgctcacctcattatttcagacggtcactattttgtatgctgtctttttaacctgtttcccccaacatgtgtgcacacagacactacattataaactgctttcaggcagtcactcacagtgcttaatatggccttgcatgttatagttcttaaaaaatgatgtgttaaattaactctagaactgttctattatgattttcccaataaataggttgtatgagacaaaaaaattccatgctctatcctatatgtgacctgcgtgtaaggcactgtactttcagatttagataaattcttttgtatcttttggggagtttgaagggataaaagtatgtgtttattctcttttcaagtatatttttaaaatacaagaagctgtgtacttaatccatagattgtagaatttattgtgaagagtctactctgttaaagcatagtatggagaggggactaaaaaatggacattgtgttaagacaaatcagttttctctttctaataaaacagttcttctgagtagtatttaattgaagtagacctaatagcaagtataaacgtttgtggggaaaagcatggtgtttactataaaatggattgacttatgtatgtatgcatgtaacatgcataagaaatcaacttttcaaagaatgtaagcacaacgttaacagaaaataaattattgggatttcttttaatccaagtctgtgaaaggtttgattaagggttttgtacatagtcagaagcttttgttatggtttctgggcaggggtattttatgtttgaggtcgggaattttctatccacataattagtcatgaggtttaatgtacattttttttttgtatcaggcagacaatgtcttcaaagagacagcagtgctgcaaaggagcaagaaaagaaggccaaagttgacacacagagaggcaaaacagtgtaggaaaaatcaacacgttttgcaaaatcaatcattgaaaatgtgtcagcattcaggagactgtctttaatttgcaatccaagtgaaatagagtatttaaatatgagaggcagtattattgagcccagcatgcctgctaccacttgtttgactagctcagaatagaacactgagaggcaagggctcaaagttaaatgaacatttatacattttaaaatcaaatgaaagattcagagtatattcatgaattaattttttttcaaaaccctaaatttaatcagctggaattactttaaaagtgtcattctatttaacttttgggaatgatgaatttgccttttaatagggatgctgtattttatcatgaagatgaaacaaactgtcttttgttaattattccccagagacactggccatttttctctctccaatgcttagtgtggagtaaaggcagcttcccgcaaatttatttcaagcaagagcaatcggaagcttcgacatgtgtgaaagaggcgcatagagaacatagcttccatttcaggtattctgagtgccacctaatgaacctcttagacataatgttaccaaagtctcactgatgaggccatgaacatagaacacagaaaagtaaaaaagaatgaaagaagagtctggtaaagagtagtagatgtgtcagatgtgtctgtagtatctgataaatgctgggactagtttttgaattctttttttttaggaaattatcatatttattataaagtactaaaatccttcacttagtgtgtgccaagctctgtgttaagtgcattgcatgaattatttcattgaatcctctcagcagcttaactaaggaagacattgaggcctaaagaggatacgtaaattacctcctggccacaatttaaaaaatgtctcttctatatttggactctggtccctgccctactgatgtcccttgtccaagaacacttgaatttattgttagccagataaaatagtgacaagtggcatgcttataacaagctcatttctaaagtaacagcaaaatatgtaactgatagtattggcagctaatttaagaaatctgttagtgatgatgctaataatggtgtcattttcattcagattgacaaggcatagagcatcagtgatatgtttttgatattattaagatctcaaaatctgtgaaagaacatctgatatttatagtaaacctaatgttaggcactggaacaattacattaaaaatgtaccatacctcaaacaatatttttatggaaaaaattgcgaatagtcatccaatagttcatgcaatctgatgagaaagatttgttggattttcatgcctttgcaaaactgaatacatttgtctagttttatacattttatacatttgttttgagtcaaataagcaacaggaagatctaaatagacctgtttaaatctctgtgatatgattttaataagcaccatataaaaatagatacctttataaatattgaatgattcttgactatattttttcattggataataatttaaagatacactgcttagaaaagtaggccttttaaagagtaaaacaaacagaaaatacttaagataaataggatcgtgttaacatatccctttatggaatttgtttcagataccactatattttagttataataaaagtctaggttttggaaaattatttttaaataactaaaattagttatttcaagatattatacagtagtaatgattattatatactcaagggtgatttcatgaaaaagttagaacatttcatgtagtggtaaacctttgggtgtttataatagacaacagatagttattagctattacaatgcaagattttatactagaatacttttttatttggtgtatatatatttagcaaggaaaagaatgaacaaacacaagttactacattaaatacatgttcttgagcagttacagggatatgggattattaatgtcaaattctggagaatgtaaagaaaagctattcattatacttgatcttgtttctattaaaaaatcatgtattacagttctatcttacatctccaatgtcaaatgtattataattgagaatggagaattagttatgtaaaccttttatcttacacagtgtaaggaggatagtagaagaaaaagtagtaaaaccaacaacaacaacaaaaaaatcccacacaagacacttcaagaaaagtgagaagaaaacaaaacaaacctgtatagctaacaggtaaatgttgctgtgtgatgaaaagaggaagaaaaaattgcctagtcttccagaataatcagaatgtctactctagcagaaagcttttgagcaagataaatcttctgaaattaactagtttaatgtagattgactataataaagaactgctgtaaaaaataagtatttttttggggaggggagcacttttaagttccttctgactgtgaaaacctgttaaatcctgaaagagggagttaaatttataaatgatctgttgatattggcacatggatagaggccttaaggcaataatggatgcagctggtaaagaagcagatctcagtcacagaaaaatgagataaagagaccatcaagaagaaaaaataatggttctattatctgtttatgtagtatatctttggatagttaagaatatcacatgaaaatgtaaagacatgcaaaataaagaccataatgaaaaacgtgagaaagatttcccttatttacagcctaatttcagcataaagattagaaagtgcttcaaaagagcagggctaaagattcttacatactaggtttttaaacctaaattacagaatttacagtattatttaaggaagggaggtcaactacttcagctctcacttcatacactttgaaaataggatttatgatggctaagaaaaataatagctctcattctattgtatggccaaattgaatgtctcttaggaggtagaaggaaacatttgaggtcttagtaaacctgaaatcatttcttaatagattatcgctaaaataggcttgaaaggagtgtatgattgaaaatgacttacaagagataaatgagttaaaatattaagaaaagatttgatgatataaagcaaaaccagtttagtaaaacttgggggattttttttaagaactgtaagttatgaatgtagagtttcataacaaaattcaaatttctaaattaaattgatgaactgtggttcagaattatagggttaacagttaagttacatatcaaccctttagggaagctcaaaatgtatttagttaataataataaaaacagctaagttagagtttattagtgttaatgtttgagaaatagataaatgggttggaagatataatttgtggtaaaatgaaataagtatgtaatatataccacaaccagtaagtaactggccaaagacagcaaagaaaaataacaattatatacattagtgtattataataaaattgtcagttaactacattggaaaaaaagtctgtaagcctcaattaaagaagatcagtgacagaacttcataatcggttgccaaaaaagcaatacttaaaatgataagatataaagacactaaaaggttaaggtttttcatgcacatgtaagtaaacagtaaagcaatagcaggatctgttgttattttatattccacagtaaaaatcattaagagagctaaacaaggatgtatatagggtaaaaggttagtagaacaaagtgaaaatgtaatgatagaatataatataatgagaatgctattgtttatttttatccttgaagagaaagcagaccttcaataagaaattgtaaatatgactggagatattataaataaattcagaaaatgacaaaccagttaccactaagtcttcacactggtctgtatggaacccaggtgtagaggtgaaaggggtaagggttctggtctcctgtcccatgtttcaaccttagcatttctgctttatctgttgcatattcaggcttaccttgtcttattgcacatcactttattgtgctttgcagatactgtgtttttttacacactgaaggttgtggcaaccctgcatcaaccaaatctattagtgctatttttccagcagcgtgggcttcatgcatgtctctatgtcacattttggtcattttgacaatatttcaaacttttttgttattatatctgttacggtgatctgtgatcagtgatctttcttgtgactatcataattgctttgaggaatcatgaactgcacccatacaagacggtgaatttaattggtaaatgtagcacatggcctgactgcaccactcaccagccatgctcccatcattctccctttcctcagacctctctattctctgtgatacagcaattttgaaattaggccaattaataaccctaacgtggcctttaagtattcaagtgaaagaaagagttatgcatctctcactttaaatcaaaagctagaaataattaagcttagtgaggaaggcatgtcgaaagctcagataggttaaaggctaggcctcttaaacaccagttagcccaattgtgaatgcaaaggaaaagttcttaaaagaaattaaaagtgctaaagtgaagcagccttactgctgataaggagaaagtttcagtggtctggatagaagatcaaaccagccacaacattcccttaagccaaagcctaatccagagcaagctcctaactctcttccattctgggaaagctgagagaggtgaggaagctgcagaagaaacgtttgaagctagcaaaggttggttcatgaggttttaaggaaagaagtcatctccaaaacataaaaatggaaggtgaagtggcaagtgctgatgtagaagctgcagcaagttatccagaagttctagctgagatcaatgatgaaggtggttacactaaataacaaattttcagtgtaaatgaaacagccttctattggaagaagatactgtgtaggacattcattgctagagagaagtcaatgcctgggttcaaagcttctaaggacaggatgcctctcttcttatgggctagtgcagatgatgactttaagtcgaagccagtgcttaccattcagaaaatcctaaggcccttaagaattatgtttactatctattctgcttgtaccctgtaaatggaacaacaaagcctggatgacagcccatctttttacagcatggtttactgatttttttttttagttttatttttcttattttaaaaattgtgtatatttaaggcatatgtcacagttttgttttttttttttttttaacatatgagtgagaacaactgtccctcacctattttgggagaagagggtagatgaagaagaagtgggttaaagggtacaaacatacagcgagctaaaaggaatgaattcagtgtttgatagcagtgtaggatgtctatacttaacaaaaatgtattgtacttgggtaatgggcaccctgaataccctgacttggtcactatggttgtatgcatgtaacagattttctcatgtaccccatacatttgcatgaataatagagtttactgaatattttaagcctgctgttgaaacctacttctcagaaacaaaaaaattgctttcaaaacattactgcttgttgacaatgcactttagttacccaagagctctgatggagatgtacaaggagattaatgttgttttcatgcctgctaacatagtgtcccttctgtagctcatggatcaaaggagtgactttaactttcaagttcttactatttaagaaatacatttcgtaaggcttcagctgccatagataatgattcctcagatggatctgggcaaaatgaatggaaagtcttctggaaatgattcaccatccagatgccattaacagcattcatgattcagggaaggagataaaaatagcagtgttaacaagagtttggaagaagttgtttccaacccttgtgggtgactttgcggggttcaagccttcagtgaagaagcaactatagatgtgacagaaattgcaagagaactggagttagagctgaaaactgaagatgtgactgaactgctcaatctcatgataacatttaattcatgaggagttgcttcttaagaatgaacaaagagagtggtttcctgagatagaatctatcctggtaaagatgccataaacattgttgaaatgacagcagagttttagagtattacataaatttagctgataaagcagtagcatggtttgagaggattgtcttcaattttgaaaggtctgttgtagataaaatgctaacaaacaacattgtgggctacagagaaatcttttgtgagagcgagagtcaattgatgtggcaaacttcattgctatctttagaaattgccacagtcaccgcagtcttcagcacccactaccctgatcagtcagcagctatccacatcaagaccctccacaagcaaaaagataacttgctaaaagttcagatgattgctaaaatttttttagcaataaaatatttttaaattaaggcatgtacgttgttttttaaaagatactgctgttgtacccttaataaactacagtatagtgtaaatataacttttatatgtactgggcaaccaaaaaattcacactacttgcttcatggcaatattcattttattgcattgttgtggaaccgaacctgcagtatctccaaaatatcaggattccaagaaacattccattactaaaagagtttgaagataactgattgtgctataataataagttataaagtgaaatatgtaataggaaaagttttaatttggagggtttttaacagtgttacagataatacacttttttttcaagtatacaagaatttattttaaaaatatgtgtgattaagaaaacataaacatttttaacatgtcatagttttggaatctaatccaggaaacaaataccagtatcactttgcttgttctgtttttctctttatcacttaccttctttctcatttctgcatattcagtttgtgctcatttcaagtccaccttcccttgaagcctactgcttttctttgtgcattttctaccacagttttacattgtgtatttattttctgcaatatttttgcttctattttataactaagcatattctattttgtattatgattatgtacttgtatcttttttcttatttataaaaataaagagaaaaaaatctttgtacatttctgtgaattttaacacacccaccaacataattaggatacaggacagattcatcaccctaaaatcttcctcatactatccctttgtgaccataacctccttttacccctaatctctggcagccattgatctattctgcatcactatagatgtggcttttggggaatgtatgggattactataaatggaatcatgtaatatgtgtcatttgtgattttttttccacttagtgtaatgcctttgagattgacccaagttgttgtgtgtgtcagcagttttttattgtcaagtagtagtctgttgtatgaatgtatcacagtttgtgtattctaccattgaaggacatttgggtagtgtgattccttcaactttttcttcaaaattgttttagctattttaattcctttgcttttccatatacataattaatttatatttccagaacaacgacaacaaaaattgctgggattttaattgatattgagctaaatctattgataaatttggggaaaattaacatttctactatgtaaagtcatccaaaccataagtacagcatgtgtcctcatttctttaggtcttccctgatttcttatatcagctttttgtagttattagcatactagtcctatacatgtattgttgggtatatattgatatatacattttttggagctattgaaaatgttcttggtttttaaattttagtttccatttgtacattagtagtatattagtagtatgttgtgtgttgtgtgttgtgtgttgaccttacatgctatgaatttggtaaacccagttattctaggattgggttttcttttgtggcagattctttgggaatttccacgtacacaatcacatcatctggagatagggacaccttcctttccaaatgtgtgcttttcatttatattcttaacttcctgcgctggctaggacttacagtgatttattgaatagaaatagcgagagtgctcatttttgacttgttctcatttttagggagaatgtattcagcttctcactattcagtgtgatgttaactgtaggttttcatacctgctctttatcaagttaagcatactgagttttgatcataaaagggtgttgaattttgtcaattgccttttctacttcaattgatatgatcaggtggttcttctttagattattaatatggtagatgacattgatttttgaatattgaaacattcttgcattcctcaaattaatttgattatggtgtattatttttatgtatttctggattccatttgcttatattttgagaatctttccatctttgttaaggaggactattagtgtatacttttatttatttatttatttcccctaccatctttgtctaattttgtatcagggtaatcctggcctcataaaatgagttctgaagtattctttcttttgttttctggaagtgagtgtgtagaattaagtgttactcatttttaaaatgttttgtatagttatacagtgaagctaactgggtttagaaatatctttttcagaaaggcattcttttaaaaaaaatggtttcactttctttagtggttatttaggactaatctggttatttgttttaggtaacttagtagttcatggtttttaaggaattgctccatttgtcatcagttgtgatggttaatattgtcaacttgattggattgaaggatgtgaagtattatccctggatatgtctgtgagggtgttgccaaagcagattaacatttgagtcagtggattgggagaggtagacccaccctcaacctgagtgggcagcatctaatcagcttccagtgagactagaacaaagcatgcagaagaaggtggaaagagcagacttgctgagtgttccaaccctcatctttctctcctgctggatgcttcctgctcttgaagattgactgacataaagactgcaggttcttcagcttttggactcctggactcacaccagtggtttttcaggggctctcgggccttcagccacagattgaaggctgcactgttggcttccctgcatttgaggttttgggactcagactggctttgttgcttctaagcttgcagacggcctgttgtgagacttcaccttgtgatcatgtgaatccttaatacactccttaataaactccccttcatatatacatctatatacatctattaattctgtccctctagagaaccctgactaatacagttgtcaaatttatgggtatagaattgttaatatttattatatttaaatgtaattaggttttatagtgatagtctctcatttttgatgttgctctttcaaatcatgttttcttttttgtcttgatacaagtttatagattttattgatcatttcagagaaatagctcttggtttcatttactctattccatttcattgacttctggttattttctttataatttttttccattaagtcctgcttaggctatatctcacagatttttaaatattgtggttgtcttgtgtattatatctccattcattgaaaatcccttcagttcatgttacatgttttgctccgtctgttaaatatattttgaagaactgaagaagagacacacaatctattacattttcccagttattgatcatgttttctcttcctttattcctaatattccaaatttccttgtgtaacttttctttttcctcaatatctttttttcttttcttttcttttcttttctttcttttttgtttttgttttgtttttttttgaaacagagtatcgctttgtcacccagcctggagtgcagtggcacaatcttggctcactgcagcctgcacctcctgggttcaagcaattcccctgcctcagcctctcaagtagctggcactacaggtgtatgctacgacgcccagctaatttttctatttttagtagagatgaggtttcaccatgttgcccaggctggtctcaaactcctaacctcaagtgatctgtccaccttggcctcccaaagtgctgggattacaggcttttgtacttcaatatctttctttagaaattcttaacacagcaagtctgctgaccattaattctctttagttttcttcacctgagaatgtcttcatttagtttcttttccaaaaggtatttttgctggatgttggattgataatttttttcccatcttcatcatttctgatgataaatttgcagtcatttgagccattgttcccctatacataatgcattgttcactctggctgctttcaagatttttctttgtttttagatttcagatttgactataatgtgtctgggcattgatttctttgggtttatcctattgggggttctttgacattattgagtctgtaggcttatgtgtatataaaacttggaacatttcagtccttatttcatcaaatgttttttcagtatcacaagcttccttctcttctgggattctacatgttcaatgttttgttactgcctataagtttctaaggtggtgttcaattttttcatagtttatctctctgttgtttaggttggatcattttcctttgatctatcatcaagttcagtgactttttcttatgtcatctccctaattgtattgcaccccctcaggaaaaaaaaaaaaaaaaaacaaaaactcggttatgtatcttttagtttcaaaaacatcatttgattcttttttgtattttctgtctttgttgcatttttctgtttttccctttgtttcaaaagtgtttgtctttatttattgaaacatttttataatggttgctttaaagtctgtcagataatttcaacatccctgtcattttgtcattattatctattcattgtcttttcatatatgagtttttttctgcttctttgtatgcctagtaactctgaattatttcatggatatgttgaatattatgttgtaagaatttgggtctcttatttctaacagagaatactgatattttgttttagcagatagtcttcctggttgcattcaggcttcaagttttaacaggtctgtgtttggggtacagtgttcgtttagttttcaatagcaaaagtattgttcaggtcatgtgtgttccattcagtgaccagcctgggacttgggtattggtagtttacttatcgaagtctgtatatgctgtttaatgttagctccacgtatacacagcttgtgagtgagtccaggagtttataaacaacttgttgtggtgacgttcccaagctctctccctccatggtctccttggtacttattctctgggatctcctttttaggttctctgaccagaaatctgggcttttatttaccgtgccttgccatgcacctgtgtctgcggaaaatggcaagagggtgtagagtataaaaagttattagataccactctcttttgggaccacaactcatttgattggagaggaaagtttccttccttgagagtttcagatctctgtgtgtccctgctgctgccgccactgtcatcaccacagaattgtttgggtgctgggatgggaaagaaccgaaaggtgaaaaataggaaaaaagaataatgacattttctgcactctccgacttaggatattcatttcctactcttcttaactagagagcttctactggggcattttttgtttgccccagtgtcaactttcaaggtttgggcttccttgagttctgaccgaaggataccagaggggaagaaatggaatatctgattcaagtatgatactactgtgaattgtgaccttttctcataatctacctgctattgtattatttttaatcaggagactcttagagcaatttcaggtttgtggaaaactgagcagatagtacagaattctcatatactacctctttctcccactgttgttatagttttctttattactaacaacttgaattagtgtggtaaatatgttataatttattaaacaatattgatacattattattcactaaagtccataatttaaactagatctcattagttgtgttgtataatttttttgttgttatttgttttttcttgagatggagtcttggtgtgttacccatgctggtcttgaactcctaggctcaagtgatcctcccacatcaacctctcaagtagttggggttacagacgtgcaccactgtgcccaggttttatgttatatagttttatgggttttggtatatgcataatatcatgtgtccaccattacagtctcatacagactaatttcactgccttgaaattgccttgtgctacacctgtttattcgtcttcctccctgcccctaaacctcaggcaaccacttctctttctctttttactgtttctgtagttttgccattttcagaatggcatatagttagaatcctacactatgtaaccttttcagactagcttctttcacaaaactatatgtttttaagattcctccatatctttttgtggcttgatagcacatttctttttatggctaaataataatatcacagtttgtttatccattcacctgttgaagtatgtctgggggtggattccagtttttgtcagttgtgagtaaagcggatataaatgttttatgtgcggatttttgtgtgaacatagctttcaactcatttgggtaaatacccaggagtgcagttcctggattgtatactaagactgtgtttagctttgtaagaaactgctaaactgtctttcaaagtggctgtactattttatattcccaccagcaatgaatgagaattcctgttgtgctgcatccttgccagcatttagcattgtctgtgtttttggattttagccattctaatagatgtgtagttgtatctcattgttttaatttgcaatttcctggttatatatgatgttaagcatcttttcgtatgtttattttacacctttacatctttttttagaagtttctgttaaatattttgctcattttaaaatgagttgttcattttttattgttgagttttaagaatattttgtatatttttgatatgtcttgtcagatgttttgcaaatatctcctcccagactgtgatttatcttattattttcttaacagtgtctttgacagagcagaaaatttttaatgttaatgaagtccaatttaacagttcttttcttgcatggattatgcttttggtattatatctgtaaaaactcattacccttaggtcacccagattttcatctgtgttatcttccagaagtttatcgtttttgcattgtacatttaggtttatgatccattttgagttaatttttatgaaagatcagtgtctagattcacatttttgcatgtgagtgtccagtcctagtaccatttactgaaaagactacacttcgtctattgaattgcctttgcttttttgtaaagattgactgcctatttatatttgactatatcgggtctatttctaggctatctattacattgatctatttgtctattttttttgcagtaccacattttcttaattattgtttatagaaagctttgaacttgaatagtgcaagtcctctgactttgttcttcagtattgtgtttgctgttctggatcttttgcctttatgtacaaactttagaatcaatttgttgatatccacaacataacttgtgtttttattagtattgctttgactttatatatcaagttgaggagactgacatcttaagaatatgagtgagtcttcctatttatgaacatgatgtatctctccatatcatgatgaagattttctttcatcagatgtttgtagttttcctcatttgtatgtattttgttatatttataactaagtgttaatatttcttttttggtgctaatttaaatggtattgtgtttaatttcagattccagttgctcattgatgttatttaagaaaaaaactgacttttgtgtattaaatttgtattctgcaactttgccatactgatgtattaagtccaggagttttttctttgattcttctggattttcaatgtataagatcatgtcatatgtgaacaaagatggttttatttcttcctttgcaatctgtttaccttttacttccttttcttgttttattgtattagctaggactttcagtatgatattgaatagaagtgagaggagacatccttgctttgttcccagtcttaagatgaaagcatctagtttctcagcagtaagtttaattttagctatggttttatttgtagattttttttatcgagttgagaaagtttctatctatttctagtattactgtgaatttttatgatgaattagattttgccaaatggttttgttttttaatgtgatcatatgatgtttcttttgtagcttattaatgtgttggattatgttaattgatttttgaatgctgaaccagccttgtatacctggaataaatcccattaagttgtggtgtttaaatctttttatgcattgatggatttgatttgctaatgttttgttgaggatttttttatccatctttatgagagatattgatttgtagttttttttcttttaatgtttttatctggttttgttattagggtgatgctggttttatagaattagttgaatgttcctttgcttctgttttctaggagagattgtagagaattggtattatttcttctttaaatgtttgtagaattcacccattagcccatctaggcccacccatctagattttctactatgtaagtttagataatttattttagatctttctcctaatcagatatatgtattcaatgctataaatttccctttaagcactacttctgctgcatccctacatttttagaaattatgttttcattttcgtttagtttgaaatactttttaaaatgtactttgagtttttggatccatgtgttatttagacatatattgtttaaattccacgtattttgacttttagtcattaatttctaatttaattccattttggtctgagaacatactttgtatgatttctattcttttaaatttgctgaggtatgttttttggcccagaatgttttctgtcttagtgaatatactatgtgagcttgataagaatgtatattctgctgttgttggatgaggtattctgtaaataccagttaaattcattgattggtggtgctgtcagttcaaccgtattcttattaactttttgcctgctgcatctgtcaattactgatggaagtgtgtttaagtctccggctataacagtggatttgtctgtttttccttccagttctcttagttttcacctcatgtattttaacattctgttggtagtatatacacactaaggattattatgtcttcctgaagaattgacccctttattattatttaatatccctctttattcctgattgtttttctggttctaagtctgctgtattaggcttctatagaggggcagaactaataggattatatatatatatatatttatatttatatttatatttatatttatataaaagggaatttataaaggagtattaaactcacatgatcacaaggtcccacaataggccatctgcaaactgaggagcaaggaaaccagtctgagtcccaaagctgaagaacttgaagttggatgttcgagggcaggaagcatccagcatgggagaatgatgtaggctgggaggctaagacagtctaatcttttcacattcttctgcctgcttttatcctagccaccttggcagctgattagattgggcccacccagattaagggtggacctgcctttcccagcccacgactcaaatgctaatctcctttggcaacaccctcacagacaggtcccggataaatactttctatccttcaatccaatcaaggtgacattcagtattaaccatcacatctgctttgtttgatattagtatagctactgtagctttcttttgatttgtgttagcatgatagatctttctttgtccctttacttttaatttatctgcgtttttatatttaaagtgggtttcctatagacatcatatagttgtcttattttttcaatctactctgtcactatctgtcttttaattggtgtatttagatcattaacatttaaagtgattgttagtatatttgcattattatctgctgtatttgtaactgttttctatttgttatgcttgttctttcttggttttttatctgttttttttgccttctctgtttttaattgagcattttgtatgactccgttttctctcctttcttggagtatcaattcttctttagaaatttttagtggttgatttagagtttgcagggcaacatttacaactagtcaaagtttactttcaaataacactatactacttcacaattagtgcaggtaccttataattattctctcctgtctcttgctgtaattcatttcacttattcataagctataataactcaacacatggttattttgaataaactttttgccaattaaaataaaaaaataagcttttattttaccttcatttatttcctctctggcacggttcatttcttttgcagatgtgagtaataacaggtatattattttccttcactctcaagagctttttaaaaacatttcttgcaaggtgggtctactgttgatgtgctggtaaggtgtgggagaatatgagaccttttataatcttacgactaaatctgctttttatttttattatttagtttctttcctattttattttaagttcaagtggtacatggcaggtttgttacatgggtaaattgtgcgtcatgggagtttggtatacggataattttgtcacctaggtaatcagcatattaggtagtttttcagtgctcacccttctcctaccctatacccttaagtaggcgccgttgtcttttgttcccttctttgtgtccatgtgtactcagtgttttccttctgcttataagtgaggacatgcagtatctagttttctattcctgtgttaatttgcttaggacaatggcctccagctccatccatgttgcggcaaaggacacgatctgattcttttttatggctgtgtagtattccgtagtgtatatgtaccacactttctttatatagttcaccattgatggacatctaggttgatctttgctattgtgaatggtgctgcaatgaacattcatgtgcatgggtctttttggtaaagcaatttatattcttttgggtatatactcaacaatgggattgctgggttgaatagtatttctattttaagttcttcgagagtctttcaactgttttccacaatggctgaactgatttgcattcccaccagcagtgtataaatgttcccttatctctgaaacctcgccaacatctattgttttttgactttttaataatagtcatcctgactggtacaagatggtatcttgtgtttttgatttggatttacctaatgataagtataaacctatttttttggtggggggcctatgccccaggatgtgaccttcaccagtatttctcagcttcctgtaccctacttaggtgagataggaaagctagaagaggctggagtggttatttttcttctcccatgttgattaggttctggcaaagtagtttcccttcccctgctggaaacaggagatttttctgatattcactgtgagaacatggagggcttatagtaaaactctgccccaataagatgtgattctctgtattcacttgtctttccagtttttgggcactgatttgccttgtaacctcagttctctgatggattaaagaaaagctgttgattttcagattgttcagtttttttcttttttctcccccttaagaagacaggagtaaggacctccaagctcttaatatgttgagtggaaacctctctttactttttaagagccttctaatagctactgtcttcttttttttttttttttttggtctatattttatagctgttttcagtgggagagctacagttgagtgttcctactccatcttatctgtacagatgctccttacagtggggttatgtcctcataagtccatcataaattgaaattattgtaagtcagtaaggcatttaatacatctagcctactaaacatcatagtttaccctagcctaccttaaatgtgctcagaacacttttattagcctacaattgggcaaaatcatctaacacaaagcctattttctaataaagtgttgagtatctcttgtaagagtatcatacctcatatcactagcttgagaaaagttcaaaatttaaaaattcgaagtatgatttctactgaatgcacagtgctttttcaccattgtaaagtagaaaaaccctgttgaccattgtaagttgaggactgtctacatttttttgaaatactgatttgtttcctttaatgattatatttctatttaggttttttattttttgaattattttggtaaattatatttttttctaggaaattgtcattttttctaagtttttaagtttacagatgatagtgtttatcattagtttttttcaaaatctcatgcacatctatggttttgctctctttccagtactcgcacaattttgtaagaggattgttacctttttaaagagaaatcttgaatatcacctattttgtttgtttttatactttaaaattttattttgtaacttttaatttttaaattttaaagagcttgcaaaaaaagaatgtttccatattctctactcgactgccctaaatggtgatatattataaaatagcacatagtacattacatagttatcaacaccagaaaattagcattgatacaatactattaacctatttatatacttcattaaaattttgccagttctcctactaatgtccttttttggttcaaaatccaagatgacacaatatgtgtagttatcattgtctctgtaactccctttgggaaaattcttcaatctttttttgtcttttatgagcttagcgctcttttttttctcctctaaattatttattgaaatattttctttataggctttaaataccttagtgtaagcagaacttgaaatacaaaggacaaacattgtgtagaacctagaacaccctatcagttcattgaatcatgatttcctccacacaagtcctcggattcttaatttgttgaattgatcctaggcctttgttgtctcaggatatttttcctaaatcctaattgattgaccagtcttatctgaagaattcctgccccctacccacaatctgtgtaggtgagttattcttctgtctcttagaaaaagttagactaggctgcaaagaacctatacctctaagcgtctcctccattttttttttaaccttctttaaatatatttttgggtgtttaaatgggattagaagtgtcatctggcccccaaaagtgaccactcttaaactaaagatatttccataataatcaaagcatagtaattttctgggagacttctcacttcatcacatccttccataccctctctggcagttctcttgaacttatcctagtgattcttcttcctattgaaaaataatgtgcgtactgccacaatttactgtagagttctgttgttagtgggataaggccaacaataccatgtagaattctgttgctcttccttcttcatgcatggaaatttgtctaagtattgttaactccctagatgtctctatacttccagcaaagagatagctggcaacatagttttgtcatttcttggacagaactctttttcttctcaggccaatgtgatagcttcttagcttgccctctttcagaatccttgtctttggtagcccgtaaggctgcagaatttttaaaactgtgtttgtatatacagttcagtagtgttaagtatattcacattgttgtgcagcagatctccagaatgttcccattttgcagtactgaaactctatattcattaaacagtaattctccattttcctcttttcccagcacctggaaaccagcattctacttttttgtttctatgaatttaactactctagatacctcataaatgtagaatcatatagtatttgtctttttgtgtgtggtgtggcttattttacttagcctaatgtcctcaaggttcatttatgttgtagcatgtgacatgatttccttctttttaaaggttgattaatgttccattccaagtatatgccaccttttgtttaattatctgtccatggccatttgggttgcttctacttttggctaattgtctgtaatgctgctatgagcatgggtgtgcatgtatttcttcaggatcttacttttaattattttcaatacatacccagaaatgggattgctagatcatatggtaattttatttatttttttgaggagccgccataccattttttatagtgatggggtaattttatgatcccatcaacggtgcacaagagttccaatttctgtgcatccttgccagcatctgttattttcaaaatttaaaacaaattttgtttgtttttatagtagccatcctaatggatagggggtgatattgtggttttgatttgcgtttttctaatgattagtggtgttgagcatgttttcatatgcaagttggccactcgtatgtatctttagagaaatagctgttcaagtattttgcccattttttattattttagagaaagggtaactctgtgttgcccaaactggtcttaaactcctgggctcaggcagtctgcctgcctcggcctcccaagtgcttggattacaggcatgagccactgcactgagctgattttgcccatttttaaactggacttttgttgatgttgggttataggagttatttatatattctgtatatttacctcttaggtgatttgcaaagaggttgacacttttgaagagtaccagctagtattttgtagaatgtccttcaatttgggtttgctttaaattcagattatgtgttatttagtaagaatatcatagaaatgatattttgcttctcccagtactatcagtaggtgcatgatttattgtatatcattattagtgacattaactttgatcccttttaataattaaagtgatatttgccaggttagcctgccataaattcattattttccatttacaattaataagtgtcttgtgggaagacattgaatgtatttgcattatgttgcttttaatcatccatttgcctatctgttttaatatctattaacgacttgccccaattattacttgccccaattattactgtgacatttgccaaatgatgattttctatttttatcatttcttctacatatcttaatttatatttattaatttatttcagctgcaggaaagagctgtatcaactctctcatttatttgtttatttatttacttaaatcagtagacaatggattttttttcctatgggttacagttcattagtattaggatggcacaaaagcagtcatgattactttcaatggcaaaaccgtgattacttttgcaccaacttaatattataaattttattgcttaatttgcttagttttattttctctgtctcaactctggaatcagccatttctccaaggagccctgattcatttcattgaaaatgatatttagaagccataatatggttgctaggtgtcctcatttctactgagagattattcctgtaggccttttcagtttcttattaatttctatttatgtcatcatttttctaagttattaaggggagcacttagctcactaattttttagttttcttaaaatcaaaatatttagtgctataaatttttctccaggtaacttttttatttgttaatttattcaccaaatatttaatacatgcctgaggctctattttaggtgcttggaacacatctgaataaagcaaaaatatttctttatttgtggagtttacattctagcagaggaagacaagtaataaaaacacattttaactgcattctaactagtttttatatgatatttttagtattcagtcctatctattttctgatttccattgtgatttcctttttccccagagaacgtagctttaataatatgccttggtatttgttgagacttgttttctgggtgaaaatatggacagtttaaaaaaatattttagatgggtttgaaaagaatgtttttaattattagtgtttttaaaaatctggcatgtagagaaaaaacttaattgcattgtttcaatgtatttattgtctgcttgcctatacattatgggactgtattaaaatctttcactatttttgttgcaatgttgttaattttttttcctgttattctgctagtttttgacatgtattttgaattacatttttagatgatttcaagttcataattattatctttctgttgcaccattccttttgtgattaggttagactaagttcatatctaatcattcttttttcctgagatttatttggttttgaaaatatttgttctagtcttttaaagttagtttgtacttattaatttattttctatatttttactttgttcctctgcatcactagattctaggtttgtctcttataaatacatttatatttttagcagtctgacagtttatttcttcagctggtgaacttagtgtatttaagtttattaaatttattataattactgacatatgtaatcaaatctaagatattatgtacatatgtgcagcccatattagatgcttaaaaaattcagaattgttacttcctcttgtgtaatttcttttgtgtttctgtaggacctgatttagatctaatacctaatgctgcccattaaactatgacagaatacccttaaactttgtcttacttaaggaactcagaatactcaattgttgcagtcatatcttaataaacatttttttcattgatatcaaattcatggcctgctgctctgttttggtctggttaattaccttttctacatacacaagaatttttcttctcagtgccaaatcattaagttaaactccacatgtaatactatcagctatgtacataactcagttaagtaaagacaaatggacagacaggattgagtgtgtgtgtgcataagcaataaaaactgtgtcataactgtgtgtgttcaacagcagctgtaagatgtcatcacttttaagatgcattcagatttcagagatgttaacatatgaaaaaatgtatggctaaaaattgatttattctggtattttaaattttatcatattttgtatttttttatttattctaactgtgttttctttttctttaaacctttttttcttgccatctattaaattgtttagatgttctttgttatcttctttgctcctctactgattttggagttatgaacctctgttattttagcatttacccttaaaatttcaaggtattcattctatttaacaaactgtaaggttaatcactttcctacttttttggataactcaagggcattatagcattttaactctgattatgttttttctacattgtgtattgtttttgtcaatgttttcagtctaccgtattctagattgcagttttacatttgtgtatgagtatttgatgaacatgtatttaatgatgcatcttataatccaagacatcttagatttctccaccagacagcaaaagcatataccatgtccgtgtgtgtgtgtgtgtgtgtgtgtgtgtgtgtgtgtgtgtgtttcgtcatttaatttcactagctataatggggcttggcttacagtagaaaataattgttttattaattgaatatttattctactataaaaagacccccgtggtaaccagaacaatctctttgttcatatgaagcacccgtctctaagagctttctagtctattgattttagacttagaccctccaatataatctgacttggaagcttatagagaatattgtgtagctatcaagtgatgaccgtagagattttcaggtatgtgtcaacacatgattatgttcattcaaaatgtgaaaggaaaattcagattataaagtattagggatataatgattgaaataggcaaggagtcaggccttggactggttggacatcttttttttccagtggtaacataatctgttatttatctttttgaaactcccaattttcttctgtactttttagctcattacattctgttgggcttaaagatttatttgctgctgtggtcacttgcttttagacaagaggcaaaactttctactgacatctacctcaggtagcaaagacaagtgcctaaagtaggtactgttttatgtgggccaaggttggaacaggatatttctccttagccttggaaaccatactagtaaaatagtttgtcatagggtgggaacaaaggttttctcaccacttcttctataccaagactggactctgtcccctgtgtatactttcttaagttttcttcttggaagaaagtagatctggctaatccactcttcctgcagtttccttgggactattgcatgggtaaaaatgaaataacttaacatgaatgaaggcgaaaagataattttaagtgctataagtaagtttagtttctttgttattgtaaagaggtctgggtttacaatttaatattagctagaactgaaataatactttcttcaactggttagtagcattactgataattaaaaactggagaatggttaaaaaattgtgtatgattggctcaactgtaatgtacaatttatatattttaataaaatttgtgacatatttatatctaagatgtgaattaatggaaaaaagagaacagctgacagaattagaagaaagaaaaggacaatgttaataataggacacagcattttaataaatatattgaatatataaaaatatattgtatctcaagaatttgatcctgttctcaagtctgtttcttactgattttcaattgtagtcaatactagttccaccttttttcctttccctttccttcagatatcatccagacacttaacacagtgcctggcatattctagcttcttgataaatattttagctatttaaatgagtaaaggaatgaatggatggagagtgaacaaatgaacaaatgacgaagttttagtcttttgcagtacaaataaatatacatgtaaatttattgagatttgaaaacaatcttttaataatttaggtaatgtagaggaaaagattaatttgttttaaaatgtgaacactggagtttttaaaagtagggttataccatctgaacaacaaatggaaaataagaattaaatgaagtaaggtaacttgaaatgaatttatgagatatgtattctttaatgtaaaagtaattgattagcaggttcagaagaaatttttaaagactttattctcattttaaccttgcttgttctagaattttgtcaagtataaattgttttgaactttctacttaaattgaatcgatttttatttctgaatcattatgagttctaatttagtgcaattgaatcaatggattttactgtgtattatatattggctttaatgccatatatctataaaatatttccccccacattttggatctatatgattcatattgtctattgattctgtatttaaatatttaaatatggtttatgatcaagtgtatgggctgtgatgtcaggcagatttgagtttctgtctctaatatattacctcttagtgagcaatttattcaacgtctcaaacttcagtagcatcttgtataaaatggagatgattgattcctactaccataaaaggttgttgggatgacataataaacttacatatgtaaaatgcttagcatagtgtttgggatatggtaggtattcagtaattgggaataactatttttctccattgtgtgttttttttgtctgcagctttccccacaaataaaccagagaaagatgcaagacatgtagtaaaagtggtaagtgttgctcatagatttgtatttcacatatatttgactttttccttttctgctttaagaatgtttttcacgttaatttttgtaactattgccttatcagtaaacctaatgttatcatctgttttgacgttgttaaaacattaaaactggagaacctttgtttttctgtattgccagctattaccctggtgtgttatctatctagctattctttctctttccctcccaaatgccctcccaccctctccacctctctaatcaagatggtaaggtccttaaaggcaagcatagggttttatttctttttggtgtcccctgtacctagtataatgaatgaaatatagtagaccattcagtaaaggtatcatgtgtgagtggaccacaaggagagtttgctgtgtatcacctggatgtatatgttggtatacagtgagtgttgtatatgtttatgtatacagttctcagtgcttctagtaagtgttctctgtaagaaaactacttttatgtgtaagactgtatagggatagtggtacaatatgtcgtttaaaaattagattcttcaagtttatttagtgttttctgagatttttagtggaaatctggtgcctatgttttataaaaagtgattcaagtactattatatactacatatatatgttcatattttcacagttgaaataacaattccatctttgggattatttttttctagtaaaattaattattcttttttttataggaatatcaagaaaatggcccgttattttcagaacttaaattttatcagagagttgcaaaaaaagactgtagtaagtaaaattagcaaagcaagctacttccatatatgtgcttgctaaagtgagtgttgatattttggtctttttctggccttctggaaaattcttttcaatagaaattttattgtaaagtgatacagttaactgttacaacatataaaagcaagacagatggtatacaaatcttgacatgacatacataatgggttatatattttaagtcaaagttgtttctactactttacataaaatgttaggttgttaatctaagctaccaagagttccctaagtgtaaaagatagtagaatgaaattatttcttttacagtaaaccatttggataggacggctataaggaaaaaacattaaaatgggaagtagatatatgtataaaaaaagaacgattgtagaatggattggggcaaggtgtgtggaaatgtgaaaatgattaaactttaagatgtttaagaaaatgttagaaacttgaatgctggaaaattaattggagctggataccaagtgtaagaatgaccagttagaagacttgaatgggaaatgaatataagcagagaggaaaaataacagcattttataaatgtgatatagatgggctaagaaaaacattaaagaagtagacaggagtaatgactgtatagtcaaggtcctttacatcatgtttaagaataagagtgatgggtctgacctcaatatttaacttagtttttcttaataaagtcttctaaacattaagactgtaatctttactaattgcttaaactatgtcacagtgacaaatagaatccattaaacttgattgtttatcagtagagctgtcttaaacataaaaaacataggctagagtcatgaaaaaaatgatgaaagttaactttatttaagtggatttgattttttgtaaactaatcaaaaccagtttttgtataaagtaatttcaaagtaagatggtttttctgcccaatttctgctttttttttcttttttttttttttttggtccattatggttttaaatcttgaagtaatagggaagaaaaagccatctctctactgatcttttggtggttaacatatgttatatttagaaatttagctagtatataagataatgaattctttttatagattgaaacattaatatatatggtatcaatatacaaagcctatgacttgtttttattgatttaatttaaaaatttctaattttttgttaattatagtggtaacagtttgaggccattagatagagatgtttgattgaaaaaaaattatcttctaggaagatctaattacttttttggttagctaaataaatttgtctgtagaaaggtgacaagtatcttttcaaataacatgaatctttttaaaaataaatttgtctttgtagtcaaaaagtggatagaacgcaaacaacttgattatttaggaattcctctgttttatggatctggtctgactgaattcaagggaagaaggtaaaatggaattattataatcaaatatttctttataactattccttatgtggtctatgagttaactattgccatgtaacaaattaccaaaacatattggcatataaccacaaacttgtattgtcttagtttctgtgagtgaggagactgcaagtggcttatctgtatgattctagatcaggatctctaataaggatatgtagtcagctgtctgctgggttacattcatttcaaggctcatctggggaagtatttgttttcagggttcctcatgtggctactggtaggcctaagaagatctacttctaatttacttatgtgattgttggcaggccttcttacttcctgatcatgtgggtctttgcataagctacctgagtgttatgaaaaatagctggctttctctagagcaattaattgggggacggggagagcatgcacacaagtgcattcaagaaggaagtcatcgttttttgtaatctaatcttaaaagggatattatcgcttctgctttattctctttgctagaagctagtcactagatagatccattggtcctgagagaggagaattcagttctatctcttgaggagaagcacaacaaataagttatagaaatatctttaaaaccaccaaatatggctagtcctatatataatttattaatagtgtttgaaaaaagaaaaaaagtgtgtcattttatatttacccttttgtgccagagacttttatatactttatcttattttgtcctttgaatagcctgttaaaataggtgatattatttttattccatagatgagagaataagctcagatgtcagtactttgttgaaatggtctctaaatgctttaaatttaaaaaaatgagcaaacagtaatcttgaagtaaaggactgccactgggggactgaatggctgattgaatcatgatacatccatatcatgtcatatgtagcccattaaagaagtccattagagctatactagttgccttagaaggattttgatgagatactattgaaaaaagtaagatggagaaaatacttataatatgatcacatttttgtaaaacaaattcctaagtgtgtgtgtttgtgtatgcatgcatagatatagaataggggctgatgtggatatataaatgaagggaaggaaagaaggtatggaaggtgccaaacagaacagaaaaggaagaagtgcacttaaagacatgtttataaatgtatagagacggtatatatgatcttatcaagaaacaaacaaatataaaattcatgtggctgggcacggtggctcatgcctgtaatcccagcactttgagaggctaaggcaggcggatcatgaggtcaagaggtcgagaccatcctggccaacatggtgaaaccccgtctctactaaaaatacaaaaattagctgggtgtggtggtgcatgcctgcagtcccagctacttgggaggctgaggcaggagaatcgcttgaacctgggaggtggaggttgcagtgagctgagattgcaccactgcactccagcctggtgacagagcgggactctgtctcaaaaaaaaaatcaagtgtgtacaataatttgttcaaggccatatggcaagaaagtcatggagtcaaaatgaattgcattcagtactatctaatttagaaagattttttcattatgtaaaacagtgtgaatggttcagtacagcattctcttatagaaaatcagctgcaaagtaaatattgagcagtttctgcaaaagaatagcagaattatgaacgtgcattcattctctaatggtttagattgcattatacttagttgttaggttgagcgtaatttttcttgtttcaaattaaatagacagtttcaagcattactttctcaggatgatctctttttgatgcttttttcttacagttacagatttatggtaatggaaagactaggaatagatttacagaagatctcaggccagaatggtacctttaaaaagtcaactgtcctgcaattaggtatccgaatggtaagaattacttatttcgcatgctccatttccaaattgtttacttcttgcaatatagaaatcttttccctttgtggaattattagagaatgaaggattattgccctagagacatcagttattaggagtagaggctattttggtgaaattgataacaatgggctctgtaagtgacagaatgtgctgtgtatggcactgcaaactcaattaggctttggttctccagtctgatcttctttttccttagagctttgttttacataccagaacaagctttcattgctgtaagaataacctttcttttgtcagttataacaatgcaaattatggcaaaatatattgtcagacattttaaacatgtgatggtaggggggtgctatgaagtttttattatgagtttgggatggtggcaataattagttgtgacaatgaataaaatatactttgccaaagcagaagcaacgaactcttaatagcactcaggcacacatttgtttatactacatatttgtcttatatgtttgtatttggtttgtttaagtctcattttttcacttttgagtagcatgaagctgcttatgccagattggaatgcagcaaatagaatgcattaattttctcatttatccatcctcgaagccagcaaatgtttattgagtactaagtgtatgtaacatgcaaggctgaagggctttagagatgaagctaaggagttttctattaccatacagaggaagaatacctttccctttgctcatggacatggcattttgttctgagattctcaaggcttgatttataattattgcttaggtgaggaattgctgagtgggcttcaagattatttcaccatagatctctgattttatgctatgtttttcctctttgtgcagtgcggtttggctactgggctatcaggaattaggcataagcatttttgaatcttgattttcttcctttggaacttcaactaaaatacttgatttttgaggatcattttacttttttctaggatgagcaaccagaagatgtgatattttagaataattaaccagtaattgtgaaatacatcgctttgtcaatgttaatatgaaaaaacccatgttattctatattcaaaatgttgaaattgatcatgagttctaaatagcagtaaaccttattttatctatttattttcacagttggatgtactggaatatatacatgaaaatgaatatgttcatggtgatataaaagcagcaaatctacttttgggttacaaaaatccagaccaggtaaatacatacttttgcttttaataaaggtctttaatgtatgaaactgaaacattcagaaaacaaacttctaacccagaagagtttacaaatgagggcgtaacatgatgaatgttgtaatttatcttacctgcttatctaatttaatctttgtaccaaactaatgagtaattaggatgagaaactgagagtcagaggggttaaataatatgttaatgggcacacagttaagaagtggctgagcaggaatttgaatttctgagcaaatatagataagcaaagaaccatcaaaatccagtgggagtagagatggatttatgtagaggttaaaacactgtcatattagttcatcatttcctactgtataaccaattaagttttaagcagagaggccgggcgcggtggctcatgcctgtaatcccagcactttgagaggccgaggtgagtggatcacctgaggacaggagtttgagaccagcctggccaacatggtgaaaccctgtctctactaaaaatacaaaaattagctgggtgtggtggtgggtgcctgtaatcccagctactcaggaggctgaggcaggagaattgcttgaacccaggaggcggatgttgcagtgagctgagatggtgccattgcactccatccagcctgggcaacaagagagaaactccatctcaaaaaaaaaaaaaaaaaaaaagttttaagcaagcttttccattaaaattttgtgtaatgatgaaaatattctgtttgactgtccaatatggtagccattagcagtatgtggctaagtacttaaaacgtggtcagtacagtaccaactgctgatgagtatttggagtaacaggaactctcatttgttgctcatggaaatttgttgctaatggaaatgcaaaatgatacagccactttggaagacagttgggcagttacttagaaagctagacactcttaacataccaagcagcagttgtgctcattagtatttacccaaatgagttgaaaacttacatccacacaaaaacctgcacgtgaatgcttgtagtcggtttattcatactcgtcaaaacattgaagtaaccaagatgtctttgagtaggtgaatggataaactgatacatccagataatggaatattattcattgctaaatagaaatgaacttttcagccatgaaaaaacatggaagaaacctaaatgtattttactatgtaaaagaagccaatctgaaaaggctagttactatacaatttcaactatatgacattctggaaaaggcaaaactatagagacagtaaaaagatcaattttttactatctccataggttagaagggagaggaaggatgaatgagtgaagcacagtggatttttaggtcagtgaaactattctgcatgataccataatggtgaatacatgtcatcatttggttgttaagatccatagaatggacaagaccaagagtgaacataatgtaaactgtggcttttggatgataaggattgtcattcttggttcattcactataaaaaatgtgctactctagtgagggatgttgatagcggagagactttgtgtgggcttgaggtatatgggaactcactgtattttccactcagttttacctacattgctctaaatttacctaaatcaaacctaaaacttctctaaaaaatatagtctgtttaaaaaatgtagattatatttttaatattaaaatattaatattgacaaactgaatttttaatttaacttaatttaaacttaaataacaatatacctagttgttactgtattatcacgtttaaagagttaaatgattgagtctataaaaaattagaaaaaatgtaattgaatatttgatctctgcattggttaaatttcttaataaaaattttttcaaaatgaaaggtgaatgagaaactgggaaatagatagataacaaatatttgagaatatctagccggtactaaaaaaaaaattaagaaaaacactaaataccttgttaaagcgatgatcgaaaagaatgaataaacagaacagagaaggaatatgactgtcctagaaacaggaaaaaaggctacctttgtgaaaaatgagaagataaggagaccaaaacagcgaggcaccctttttaaaggacttatcaaattggagaggtctaaaataatagtctgataatattgaggctgataaaggtaccagcacttttagaatgccctttgggaatgtaaattaaatggtataagaaagttagtggaagggaatttggcaatatctgcatacttttcaaagattaggttttttgagatataatttacaaacagtaaatgtcacgcttttaaatgtacagtttgatatcttttgacagatgtatgtatcatgtaaccactactgccaccaagatgtagaacatttctttcattcccaaaagttctctcattcctgtttagagtcagtccccttctcctggcattgctcccagccccaggagatgatttctgtccctatatttttacattttcaggaatggtatataagtggaattgtaaggtatgtactgttttgggtctgttttccttcacttaacataatgcttttgagatttatctttgtaggtcattagtagttcattcctttttattgctgagtagtattctattgaaaactgctacaatttctgttcacctgttgatggctatctgggttgttttcagtttttgacagttataaataaagttgctataagctaagcattcacatacagccttttgtggagacatatgtttcactttcttttgagtaaataactaggagtggaatttctgggtcatatgaaagtgtatgtttcacatggaaactgccaagttgttttctggagtgactgtaccattaaacattcccatcagcaatgtgtgatatttcatttgctccacctggtttcatttttttttccatactttaagttctagggtacatgtgcacaaagtgcaggtttgttatatatgtatacatgtgccatgttggtgtgctgcgcccatgaacttgtcatttatattaggtatatctcctaatgctatccctccctcttcccccgaccccatgacaggccccggtgtgtgttgttccccttcctatgtccaagtgttctcattgttcaattcccacctatgagtaagaacatgcggtgtttggttttttgttcttgcgatagtttcctgagaatgatggtttccagcttcatccatgtccctacaaaggacatgaactcatccttttttatggctgcatagtattccatggtatatatgtgccacattttcttaatccagtctatcattgatgcacatttgggttggttacaagtctttgctattgtgaatagtgctgcaataaacatacatgtgcatgtgtctttatagcagcatgatttataatcctttgagtatatacccagtaatgggatggctgggtcaaatggtgtttctagttctagatccctgaggaatcgccacaccgacttccacaatggttgaactagtttacagtcccaccaacagtgtaaaagtgttcctatttctccacatcctctccagcgcctgttgtttcctgactttttaatgattgccattctaactggtgtgagatggtatctcattgtggttttgatttgcatttctctgatggccagtgatgatgagcattttttcatgtgttttttggctgcataaatgtcttcttttgagaagtgtctgttcatatcctttgcccactttttgatggggttgtttgtttttttcttgtaaatttgtttgagttctttgtagattctggatattagtcctttgtcagatgagtaggttgcggaaatgttctcccattttgtaggttgcctgttcactctgatggtagtttcttttgctgtgcagaagctctttagtttaattagatcccatttgtcaattttggcttttgttgccattgcttttggtgttttagtcatgaagtccttgcccatgcctgtgtcctgaatggtattgcctaggttttcttctagggtttttatggttttaggtctaacatttaagtctttaatccatcttgaattaatttttgtataaagtgtaaggaagggatccagtttcagcttcctacatatggctagccagttttcccagcaccatttattaaatagggaatcctttccccatttcttgtttttgtcaggtttctcaaagatcagatggttgtagatgtgtgatattatttctgagggctctgttctgttccattggtctatatctctgttttggtaccagtaccatgctgttttggttactgtagccttgtagtatagtttgaagtcaggtagcctgatgcctccagctttgttcttttgtcttaggattgtcttggcaatgcaggcccttttttggttccatatgaactttagagtagttttttccaattctgtgaagaaagtcattggtagcttgatggggatggcattgaatctataaattaccttgggcagtatggccattctgatgatattgattcttcctatccatgagcatggaatgttcttccatttgtttgtgtcctcttttattccattgagcagtggtttgtagttctccttgaagaggtccttcacatcccttgtaagttggattcctaggtattttattctctttgaagcagttgtgaatgggagttcactcatgatttggttctctgtttgctgttggtgtataagaatgcttgtgatttttgcacattgattttgtatcctgagactttgctgaagttgtttatcagcttaaggagattttgggctgagacgatggggttttctaaataatcatgtcatctgcaaacagggacaatttgacttcctcttttcctaattgagtaccctttattttttaaacttaaagctctcttattcattacagtttattataagtggttttccagttgttccaacactatttattttaaaatatctttgcttcagtaatattagttgttacttttgtcatatactcagtttcctcatgtacttggttttatttctgtactttctgttgaatcacactgatttgtctatttatataacaatactagccataaatacttttgcattaatttctgaagctttataatgtaatttaacattggattggactagtagttccctgtagttctccgttttcagtgttatcttagctatttatactggattttctgtattattttgtttagtttcatttaaaaggaatacttgtgctgggcgcggtggctcacgcctgtaatctcagcactttgggaggctgaggcaggtggatcacgaggtcaggagatagagaccatcctggctaacatggtgaaaccccacctctactaaaaatacaaaaattatccgggcgtggtggcaggtgcctgtagtcccagccactcgggaggctgaggcaggagaatggcgtgaacccgggaggcggagcttgcagtgagccaagattgcgccactgcactccagcctgggtgacagagcgagactccgtctcaaaaaaaaaaaaaaaaaaatacttgttggcattttcattgaaattatgttaagttttaaaattgatttgggggagacctcacatctgtatgatgtatagatgttcatatatgaacaaggaatgtttctgtttttcatcaattttgcattaggtcattaggattattttaaagctttcctcttactagttttgcatatttcttattatgtttgtttcaaaatattatacctttttgttgatattgtcagtggatttattctattatttcttattatttttgtttatatatatgaagaatttttatttccatgcattaattttatatcctgttaatttacggaattatttgtggttcagagtggttttagtaatggttctttagagttttcttagaaaactgtcatatgcaagtagatacagtagtttttcttcttttacagttcttgtatttaatttgtcttgtctaattgcattgtctaatacattcaatacagtattaaatagtaagaaatgtaatcatcttttactcttcttaatcttattggaaatgcctgaagtattaccccattaaatgtgatgatggctttaggactaaggtttgtgtatatgtttgtgaatatatgtgtgaatatgagtgtgtgtgtatctgtttataaagtcaagaaaatatctgtcagcgcttatgttcttgaatgtgttttatttttatggaatgggtattgaattttttcagagtcttgtttaacatctatagaagtaatcatatttgtctcaaatattttaatatggtataatatattgctgagcttctaatattgaaccaaccttttaaggaataaatcttgatgtgttatggcataatattagtgtaatgttgaagttcattaatattttatgatgtgatttcatattgatattcgtaagtgatattgatccatagttttctaattttgttctgtttttatcatattttggtgccaatatatttggttcataaaaagaatttggaggttttattttctgtgttttagaactatttctgttacattggaaccatctggtctttgaatgtgaaactatttgattcttttgcttttctgcgtggtagttctttgtgattctctacttttttcagaaattggttcgattctttatctctatttgagtgtctgttttagttgttattcatgttatctgttttttcaattttatttgtgcggtggtctgcattgtagttttttatgacttaaatttttcgtacttcagtgattgtttctctctagttattttaaactttattttgctttctccctttttctatccttatgaaggtggccagtagtagtcccttttgttaatttttcaacaaagttcaattttgactcattaatgagattttttcttttttcttattattaatttctgactttttctttatcttgtcttcatatatactcttttagttttacctttctcttctttttctagttctccaattggatgtccctccataagagtttaaggctatgaattttcctcccttattgttttatattatatctaattgattttgatatgtaatgtttttgttctctttattctttggaaagtttgtatttttctttcaccaaaaaagtagttcagtaggaaattcttaaatttttatgtggaagggcctttaaatattgtttttattaatgcctagacttatcacaatattattatgatattgtttataataagtttactctttggaatgcactgatgctttaattgtgacttaaaagctgatcagtttttgtcagtcttccatgtttgcttgagaaaaaggtagtcttattttcagagtgtaaaatgcagcaaaaatccaaaagatctaccttattcactgtattgtttatgtcatctatatctttatttactttttgtccacctaagctgttttgtactaagagtggtgtttaaacgtctactcttattagtgtttctctctgtctccttgttctcctatagtttttttttaaataaaaattattgctgttatttggtatacatttgtcactatatttgttgtgttttcatcttgttttatgtgtttttttaaatctttcaagttgtttagggggagagggactatttatgaaagtttgtaatttttattgtagtacttgctacaacaacagtagttgtatcatatttagcagaggaaatgtagtttgtcccctgtactgtttggttaaaaatgtaaattaaaaattaaaatttaaaattaaattatacagtcatgtaccatattatgatgttttagtcagcaacggaccacatatacaacagtggtcctgtaagattatattggagctggaaagtttctattgcctagtaatatcacagccatagtaatgccatagggcaacacattactcatgtgtttgcagtaatgctggtataaacaaacctgtgctgctctttgtatgaaagtatagcacgtaacaattatgtacactatatagtacttgataatgataataaacaactatgttactagtttatatgtttatttattatactattattattttagagtatattccttctacttatataaaaaaaaagttaactgtaaaacagcctcacacaggcccttcagaaggtattccagaagattgtttgttatcatcggagaggacagctccatgcatgttattgcccctgaagaccttccagggggatgagatgtggcagacagtgatattcatgatcttcaccatgtgtaggtctaggctaatgggtgtgtgattgtgtcttattttttaacaaaaagatttaaaaaaataaaaaagaaaataaatatagaaaaagcctacagaataaggatataaagtatttttgtatagctatacaatgtttgtttaaagctaagtgttatgacaaaagagtcaaaaagttttaaaaaaataaatagtttataaagtatggtatggtaagctaaggttaatttattattgcagaaagaaaaaaactgtaaacacatttaatgtagcctacgtgtacagtgttttataagtctacagtagcatacagtaatgtcctaggccttcacattcactcaccactcactcactgactcatctagagtaacttccagtcttgtaagttccattcgtggtaaatgccctatacagctataccattttcaaatcttttatatggtacttttaatatacctttttatgtttagatatatttagatacacaaatgctattgtgttacagttgtctgcagtatttactatagtaacatgctgtataggtttgtagcctaggagctataagttgtaccatatagcctaggtgtgtagaaggctgtactatcaggggttgtgtaagtacactctaggatgttcatacaatgatgaaattacctaacaatacatttcttagaacatatccctgtcattaagcaatgcatgactatattaagaaacatgtacttacagaagtgatacgtcttaagaaaagacaataaaaatccattttaactaactttttggtcatttattgtgttaggcattatgttgtatgctttaataatattatgtttataattacaaatttgtgcttcattgataggtaggtagatattatcctcttggaccacctaacctaaatttttaagctctctttgaaaccttgctgattttggaatatgatatggtgttgcacaatcgataactagaacagtggccttataagggctgatctagtatttggaaaacaaatgtatccttctggtttccttacttataatggaattatcaaaaatgatagtggtgtttcgagtaatgcccacttgcctatatctcccagtgtcacttggaggaagttgatgcagtttgagattacaacttttatttcagtggtgcagatgctcacatctggaaaggcacctctttgtttatcagagacatattcttttcatgcaacagtttatatgaagcctttcttaatgattctagtctatactgagcttttcctttttctaatttcctatagctcctaatgtatattttaagcctgtgagtgctcaggtctcacttgccttcgtgttgtcttacattctgaactagaatgaactcctgagatatacttcttttatattcctcgcagcatgtgtatttgtattcctttcctataaccctttaagaaatactttattgactgcttaaggcatgaggccagtcttgatgcaatatctgtcatctcagtgccaggaataccttgattgtagagctccttgccccattatgctgcatgtgtttctgttctcaagctgcctactaggtcaaagaggatggccctcacaggtagagaataattcttcatgtcaacatgtgaatgttagtatacctgtgttctttaaaaacacttgtcacagtgccttcttgattcctggcgattgtggtggactaagagtcaagagactaggttctagtttcagcactgccattaagcagaattgcaaatcacttaacctgtataggttttggctttctagtgtataaaatatgagatttcaactaagtgatctcaaaggttccttctagctctaaaattctatgattttatgaaaatgtgttctccaaatacttaaagctcattgcagaaggtaatgtttcttatagtgtttccaaagtgtcttgcctattgttgtacagttaaggaagttgaaaagtagaaaaaaatttagtgatctggaagaaggagttgtaatacctgacctgtatctggtggcaaaatacttactttcaaagttcctaggatattcatagggcagggtcataagcctcattaaatccgcttgtttactgtttgctgaagggaattctaacacaatccatttatcaatccaggttgcttgtaaaatggagtgtgaatgtgtttgtaagaattttgcatggaatgtgcacataatatggtcactatttagaagtagtgtttcttgtgttcaccatctataaaatttagttttaatcacttctatatataaacaatataaaatttacttactgtaatatctgtatttcattatctccagaatagtgttatatattttagcttaatgatactataatattactaggtggtatagctggtgagactcctttaaagtggatagggtttatgtggatagcattatagtatagattaacatgcatgttattctttccttccttgtgaggttctgctgtatattttcagataagcaaagagactttggaaatagttcctgtgattttaattatttggacttttaaaattaatattttatgagttttacattaataggattattttaaaattatatactttcacttaatttttctttgtctcagtataactatcatatgaatacattgtttttgaactttgataatttgctatatatctagattttgtggatcagttctataaactgttttaaggttctctcagtattatttttcaaagaaaaataaactctatgctaaattttatttccatctaactttgtgtaatgtgttaatactgctattttactaaacatcaatttgtttattaaagtattttaaaattgtttaatcaaatgcattttttaggtgaatagtgttcctattgtccaaataaattcttaacatgggccaaaccagattagagccatattaaaaaattcttgttttgaaatcctatgtaaatgatagctatctgaatatgggctactagagtcttattattattggagggtagtgatggatggaaaatattgaagaaaacagcataataattatgatttagaatccatggtttcgatatttaaaatattttgtgaggcttcttttccagtgctcgtaagattccaaggcaagtaagaagctgttacatatataattttccctgcagaacaatgtgattttttcagttttttattttgaaaatttttaaacatactgaaaaatagagaactccatatgactatcacttttaaattttttatctattttagatggaaatattttaaagtaaattatagatatcattacattttacttaaatactttagtatgtatgcatctccaaaaactaaggacaattcactatattatcagaatgtgattactactcttaacaaacttcacagtcattccttaacgtcaggtacagttttatcttccattttcttctttatcctaaaatatgagaatatagaaatacagattaattattctaattgtacttaagctctctttttctttttttgtgactttttttagtggacttctctgtgccacactttctctttctataaatccagcagcctagatcatgtgatttctttggtcccttttatctctcatagcctctgtctgactcactgggtagaactggttgttagctaaaatctgatttaggaaactgctggtgtagaaccaggtgaatgtgatctctttgatatatatgtacatcaggagagcatgtttcttatcttataaataggaaaacagggattgtgtttatttcaacttatatttccagaagctgttatagagcatgaaacataataagcattcaataagtgatgagggcacaatgagaaattaaatagattaatgcataaatgaatttgttaatcaatgttcaggagtaacaggtcaagccaaccaagtagagctggatatactgtatatagccaggtatagtaactaagtcatttgtagatttcttaaattcccattgggaaagatctacccaatgtgtcaaaagatctttactatttaatatagccattatgattatttccttgcagaaaactcttttagcacattcacatagagaaactgacaatgggaactgctgtgggttgaattgtaccttctcaaaagctgttaaagcatcatgaggaaaaagccctcacatattaatattaaccttgaatataaatggattaaatactccaattaaaatacacagattgccagaatggattttttttaaaaaatgaaccaactatatactagttacaagaaactcaccttgctggtaaagacacttatagattgaaggccaagggattgaaaaagatattccacccaagcagaaaccaaaagcaagcaggagtagccatgcttgtatcagataaaacaggctttaaatcaaaaacagttaaaaaaaaaaaaaaagacaaaggaggttattatataatgataaaacaattcaacaagaggctataccagtcgtaaatatacatgccctgaactcaggagcagccagattcataaaacaatattacgagacctaaataaagagatagcaatacaataataatgggagacttcaacaccccactcacagcaccagacagatcattgagacagaaaatcagcaaggaaactagacttaattgaacattagatcaaaaggatgaaacagatattccaagagctgcagaatatacattttactcatcatcacagggaacattctccaagatagactgtatgttaggccacaaaactagcctcaatacattttaaaaaatcaaaatcatatcaagtgtcatgtcagaccacagtggaataaaactagaaattaataccatgagtaattattgaaactatacaaatacatggaaattaaacaacacattcctcgctgatctttggatcaatgatgaaattcagataaaaatttttaaatttttgaaatgaatgaaaatggagacacaacataccaaagcctttgggatacagaaaaaagcactgctaacagggaagtttatatctttaagtgtgtacttcaaaaaaagaaatcacaaattaaccaaacatcacatctcaaaaaaatagaaaaacaagaacaaaccatacccatagctagcagaagaaaataaatagcaaagatcagagcaggactaagtgaaattgagaccaaaaattaaataaataaataaaaattaaaataaaaaaatcaacaaaatgaaaagtttgttctttaaaaagaaaaactaaattgataaactactggctacactaaccaagaatagagaagttccaaatacacataatcagaaattaaaaaggagacattacaactactaccacagaaatgcaagagatcatcagagacttctgtgaacaactatatgcttataaactagaaaacctagaggaaatggatacattcctagaaacatacaacctctcaagattgaaccaggaagaaatagaaatcctgaagagaccaatacgaaagtagcgagatagaatcggtaatagaaaaatcttaacaaacaaaaaaagccagtaaccaaatggattaattgccaaattctaccaaaagtacaaagaagaactggtaccaatcctactgaaactgttccaaaaaatcaaggaagaggaaattctccctagttcattctacaaagccagtgtgacccttataccaaagctaaacaaggacaaaacaaaaaagaaaacgttggatcaatatccctgatgaccatagatgcaaagtcctcaacaaaaactagcaaaccaaatcccacagtgcattaaaaagataatacaccatgatcaaataggtttcattccagggatgcaagtattcttgtgatgtgattcatcacataagcagaattaaaaacaaaaaccatatgattatacatgcagaaaaaaagcatgtgataaaattcagcatctcttcatgatagaaaccctctacaaaccagacgtagaaggaacatacctcaaaataacaaaggccatatatgccaacatcatactaaatgggggaaggttgaaagcaatctccctacaaactggaataagacaagaatgcccacttttaccactcctatttatcatagtagtggatagcctagctagagcattcatgcaagagaaagaaatgaaatacatccagattgcaaaagaagaaatcgaattatctctatttgccaacaatatgatcttatatttagaaaaccctaaaaactcctgcaaaaaactcttaattttgttaaatgaatttagcaaagtttgaggatataaaatcaatgtataaaaatcagtagtatttctatacaccaataacagtgaagctaagaaccaaatcgaaaaggcaattttatttacagtaactaaaaaaatgaaataaaatacctaagaatatatttaaccaagaaagtgaaagatctctacaaggaaaactacaaaacagtggtgaaataaattgtagatgacacaaacaaatggaaaaacattccatgcttatagatcagaagaattgttaaaatgagcacagtgcccaaaacaatctgcagattcagtgcaatctctatccaaatacaagcatcatttttcacagaattagacaaaaccatcctgaaattcacatagaactgaaaagggggcctgaatagccaaagcaaccctaagcccaaagaacaaagctggaggcatcacattacctgaccacaaattatactgcaaggctatagtaaccaaaacagcatggttctggtatcaaaatagacacatagatcagtggaacagaatagagaaccaataaataaagctacatatctacacccaagtgattgttgatagagtcaacaaaaatgcacactggggaaaggacaccctgttcaataaattgtgctgggaaaattggattgccatatacagaataatgaaaatggacccctatctctcaccatatacaacagtcaactcaagatggattaaagacctaaatgtaagggctgaaactataaaaaatactagaagtaaaacaagggaaagctcttgtggacattggtctaggtaaataattatagactaagacctgaaaagcttaagcaacaaaaatagacaagtgggatttaattaaactgaaaaacctctgcacagcaagagaaacaatcaaccaagtgaacagacaacctgcagagtggaagaaaatatttgcaaacaatgcatatgacaaagggctaatatccagaatctataaggaacttgacaagaaaaaaaaataaccccattaaaagatgggcaaaagacatgaacagatattgtttaaaataagacataaaaatagccaataaatatatggaaaaaatgctcaacatcactaatcatcagagaaatgcaaattaaaaccaactgagatatcatcttatgccagtcagagtagctattatgagaaagacaaaaaataacatgttttctaaaacccagatgcatacatgaccaaagagcaatttatgaccaaaatatttgagcatcctgcttcacaaactgttacatataggcttttttttttcagttagtgtgggaaaatggcatttctgaattttgaattactccttgaactgtgtaaattaaatgaattaacaggtgcccttttttagtggctcttaaaaatcatggaactccaaggggctatgcaggtagcactattgctagcgacctcaaatactatctttgaatttaatagaatatgtagttagtgtaaaccaagtaggctacttccaatgctggttagttgtgttttatgtagacacagcctatgtatgttgaacctttttataatataccaatgacagtcaaattatatcagctaacattttgtgagtgtctgctgtttacagatataccaagctctgataatgcttactgatatactgaaaagtcttgattaggttcagatttgaatcagacaaagaggaagaccattaagccaatgcaatccagatttccctcttccattgcttttttaattttgttaatatacacacacaggttgtgtgtcttgattagattggaaattgagagtatcataggttttttcttataatccttgagaacttgtgtcaaaaggacaagttggaaatagactgtaattggaaagattttctataataggtgaaggtatttttagtaaagaggcaactgctagcctatgaactattgagggaattttccccagaagtctggaaagcctgttaagtcacagtcctatttaatcaaacaggctttgatgttttgctaaaagaaccaggttagaatagaaaagcagatcatgaggtcaaaatgctattatcatttataatattactaaatatacatcaaggttttgttttgatactttaatttatggcagtatttaaggcagtcatagtcttggtcctaatggggcagtagatggaatgacgcagtaatagaggcacagcttttctggtggttatccaatataatgacttcatgagcatgtcattaagtctttcactctcaaaaaatatgaaaggataaaattttcagtttgtaaatatgaatagatagttataagatctaggaggaaaaaatgatccaacatacaaagcagattatttttaaggataagcacatgttgcttccatcaaaacagaaactgctttttacagctcactaaaagataaaagataaactatagttttgaaaactatatcttcatgcttattctaataaacctcatatttgaaaagtaagccagcacctctttaaggttctgttactttgtctacatggaattgtgataaagcactagtatcatttgtagggttttattattggcaaacaaggcagggaaattgaggagaaacaaaaaagtactgtatgataatacaaaacacaaatttgcatcaaaacatagtagcatctttgaggctacatccatgttttaacagatatgagtgattcttgtgaacataaacatgttgctgcttcatttgtcatatagtggtttcataagtatgcatgtaatttattgtgaagatttttgccttatggtatcttgtggaaagataggaaaatattattccctattcaaataagataaatgatggctttttgttttaaagaaaagctttaaagttgctgaatacatatatatactcttcccagtgggtttttcttttttattgattgaagaccttttattttttttgtaaaacagctaactacaatgctgttcatactgcaaagtaactggcctttttcagtttcttgtgaatccattcagtttcaaggtcttctctctttacgcatgatattttctggaacaatttatgaagtttaaaaagtggtgtctagcttgccatttttaatagtcatgaatagtgactttcttcctagtataattttcatcagtctctcattatgagactttaatggacacatttctcattacagcaaggtgtgctaattaagaagatttaattgtacaaaattgtctaaattataaggtggtatattgtacaacaggaaaaattagtttacttaatattgttcttcataagagacctcattttgagagctgtgtatgcatctattctctcatgtgaatcttcattgtggacataaaatagtaaacaaatgtgatttaatgtgtggtcacatcccagtggacagtgacatttgttcacattagtgtcctgcttctttctctgccagctccaaatgtttttctccctgtcttcagcttacattctcctacttcttatatcaacgtcgtatcaagcattgagaaatgcttccatttgagccagtctggctgcttgctactcaggattctcggttgcgtgagaagcaggaaagcagcagattttacccttgttgggaaagaggccctttacgtctttccatcaacttttactctgtcactcagtcctccataaacggacaaaccaggaactagttggattagggtgttagtcaccagtcagctagtttgcttttggtacagaagtgattgagtcattttcttaccaaatctctccttcctcttcttactctctttttctctatttattgaatcatcacttactcagccagttacactgttttcagagttgtctttgactctctttctctcaaccctcttatccagtaactcgtggatctcttctttgtctcccttctgctcaccactgtcctagtccgagttcctgttgattgcctgtattgttatattctcctaaatggactctctgcatccatttcctccttatgatgctgccagtgctgatattattattctttgccagaaaaatccttccgtgacatctatttgcttacaaaaattgtgccccaccttcttagcatggtttccaaggctctctggaaactgatgcaaacctttctttctttctttctttttttttcctggcttgtgttgtgtttccaccaacttctccgccctcaacacacactgacacatgctctggttgccctcttgtatgtttcttcttccctgtctccatctgtggaagtcttagaaattattcagtacccaacttaaatgttgcttctttctctgagtctccctgttagaaatagcctttccttgctgtaaaatttcatagacttttatgcttttgtcagagtatatgttacctctaggcctgtagatgtgcttatgccatctccctttctgctatgtgaggcacatggaaaataactcagaacttctggtcagattgatttaggttcaaatctcagctttgccagttactagaatttatttgttttacatagatcacctacccttactcatccttttttctcattctcaaaagatcttaaaataacttcttagggtcatgaggattaaatgatttgacttatgtaaagtacttaatgctcttacagcaagtatttgataagtatgcattcatttttctttttcttttttgaagtgtatatttcctgtttattatgcttggcactcaggtatctgttaagcttggcactcaggtatctgttaaaaaaatttagttcagtttgtctaattattatcaattaaatcaattaaaatttattcaaaccaactgtgcagaaggccttagagtaggtgctgttatggatacaaaaatgtatatatgacattatcccagtccctcaacccctaggagcctacagcctttaactgtggagccaaagcataaatttaaaaaagctaaataactttgtacattgttaaaatagcagattcatgtggacaaggtgaaaacccagtaaattgccttgtgcttaaaaggatctgtagtagtccattcccatactgctatgaaaaaaaaaaaaatacccaaaactgggtaatttataaagaaaagaggtttaattgactcacagttctgcatggctggggaggccccaggtaactgctatcatggcagaaggggaagcaaatatgtccttcttcacatgctggcaagagagaagtgctgagggaaagggtgaaaagccccttataaaaccatcagatctcaggagaattcactcactatcacaagaacagcatgcgggaaccgcccccatgatctaatcacttcccaggggtccttccctcaacacatgggaattacaattcagattacaattcaagatgagattttgggtggagacacagccaaaccatttcaggttctacatataaaggccattctcttataactcaccagagagaggatttcacagggttctttctttctgtatgtaaatatatatatatatttggagatggggtcttactctgttgcccacaaaatcagagggttctttttaatcattagctttacccatccatctggaaaaataaagcggtgtaaaagcctacaagcatcaggaagcaaagaagactggaagtacaggcttaactaagtgtagaacttgggaatatggcatacctgtgtacaaatctggccaagtgaaataggaaggtgatctggccaggtgaaatatgaaggtgattttctagacggactgcttagtatatgaaacttgtgtttttcatgatcatactcaaaggctaatttgcttttcatcttcattccattctttaatcaaggctgtgatttattgacccctctgtcataaattggggagaacatgtatatacatgtatgtagcaactttaaaggcttttcttcaaaacagaaagcaatcatttattttaatagggcataatatattcctattttttcaataacataccataatgcaaaaatcttaacaataaatcaaatgcatatttacgaaaataactatatgacaaaaagggaatgaagcatggaatgaagcagcagcatgtttatgttcacaagaatcattcatatctgttaaaaaatatatgtagcctcacagatgctactgtgttttgatacaaatttgtgctttgtattattatacagtacttttttgtttctcctcaatttccttaccttgtttgccaagaatggggttcttggggaggctaatactgagatagaattaggagggcaagggctttttggaggcaggaaatctaatgcccatgtaagataaaaggggaggaagcaggattgaacagggaaggcttccagagcgggatgttgatctgacacttgtgaaaggaaagggaaccagaggcagaattgaggagggagagcttcagacatgatgcagatctgacaaaatctcagtgcccactcccgacattggggagctccagagcaaagcttgcctattaggagagaccccagctatgtagaaatagtcacaccctctccatgatcaactgcccaggaagagtgtggccttggtgcacacgctgtggtaggacccagtggtcctgcccctagtggatgtcgacttattgcattccttacaagtaaagggccgcttctttcttgatgggattacacctcagtggctgcaacactacattttcaatcacaaagtatcaaaatggaaagcctgtaaaagcgttagttaaaattagttgtttattggaggagtcgagaagttcactaaaataacaaaacccttggacaggctggccttagtgagtgttgagtggcttacgttgtttgggaatatatttttcatctgttaaatgttgataatgacatccatcttccctatctacctcacaaagttataaaaaaaagtaatgtctaagaaaggcaagaaaatcatgtgagagtcaatacagtgtaatagaaaaatctctgtgtcaaggtgaagggaagcaggtaaggctgtccctcgtactcatggagaagggaaatgatggctacattcagaaaaagtgcataaaaggacaatcatttgaaatgcattaaggagtctgggcgtggcagctcacgcctgtaacccaccattttgggaagctgaagcaggaggattgcttgagcccaggagttcaagaccagcccaggcaaaaaagtgagaccccatctctattttaaaaatataaaaataaatgcatagggagtaactatttatatattcctgtggctagtcttactacaacgcaaataatcacacctacctgatcctggtataaatcttgagttccacagacaggcctgtttaaaactaggggtattacacatatttacaattaaaatgaaaaatattagccgtttgtttttgatttcacagaaaaaaaaaggtaatatataaaaaactttgaaccaaaacaagttttattttagattatagattggcaactttttctgtaaagagccagaaagcaaatattttaggcttttatgagctctgtgggtcacatatggttctctgttacattttcttctctttttctttccctttacaattctataaaatgtaaaaattattcttagctttagggtgtataaaaataggacctagactgtgacccctactatagatttagttctgcacaaactcatttttgacttcaacataatttcagaagttgacagaacccttaattctatattgtatttttgaaaaaagagaatggaatttggaagtcatatcagccaggattcgaatcctgctttcatcctttacaagctctgtgacttgggcaagttatttaactgctgggatgctcagctttcttatatgtaaaataaaaccagtgctaccaggctggatgtgtttgtctagatttaatgaaataatttgagaaaggtactttgcccagtgattattagataatagaacctcaaaagatattacttcatttcttcccttcctttacttatttgatggtattttctagccttccctcccccacatctcctttgttctagcaaaattctagactgtctttctctactgagttatcttagtagaactctcagtgtgacctaattgtagtctgtaggggtggatagaaaacttctcttccacgcttctctgaagggtcactggaatgagctgacagtatagtaacaggaaaaaaaaaaaaggcctacaaatttattatgtacatggacacgggagtcctgaaaatatgagactcaaagaaggtccagatggttgaggcttaaataccctcttcatatggaagagggaagtggggaagtatatgcaattttagaagcaaatgacttttaggggaagtgaatgagcccaaacaacagactactggcctcggacaaagttgttctgagctctgggggacattgcagcacattgtgggaagctgaagggtggaacttcattatgaacacaagttgtcttaatatgtagataaagtcttttaggtaatctcttggaactgccctcagaagaataaaagcctgtctgggtgtggttatgacttttagtcttttctttggtgactaatctttcctggttatttgatgagattcctggggaaggagttttaagacaattgcatttctaggccaggcacagtggctcacgcctgtaatcccagcactttgggaggccaagggaggcagatcatgaggtcaggagttccagactagcctggccaacatggtgaaaccccgtctctactaaaaatacaaaaattagctgggcgtggtggcacacggctgtaatcccagctactcaggaggctgcggcaggagactcacatgaacccgggaggcggaggttgcagtgagctgagactgtgccactgcaccactcctacctgggcaacaggagcgaaactccgtctcaaaaaaaaaaaaaaaaaagacagttgcgtttcttctggaagaacttcccttaatcagatgatggaacttcagagagagcccctcctgctgcttctggaaagaaagaggaccatagagactttcatgcgggtccgtgtgaagagaccaccaaacaggctttgtgtgagcaatatggctgtttatttcacctgggtgcaggtgggctgagtccaaaaagagagtcagcgaagggagataggggtgggaccgttttataggatttgggaaggtaatggaaaattacagtcaaagggggttgttctctggtgggcaggggcggggtcacaaggtgctcagtgggggagcttctgagccaggagaaggaaattcacacggttaatcacttagttaaggtggggcaggaacaaatcacaatggtggaatgtcatcagttaaggcggggcagggccttttcacttttgtgattcttcagttacttaggccatctgggcgtatacctgcaactcacaggggatgcgacggcttggcttgggctcagaggcctgacattcctgcttccttatattaataagaaaaataaaacaaaatagtgttgaagtgttggggcggcgaaaatttttgggggtggtatggagagagaatgggcgatgtttctcagggctgcttcaacaggattaggggcagtgtgggaacctagagtgggagagattaagctgaagggaggtcttgtggtaaggggtgatattgtggggttgttagaagaaacatttgtcatatagaatgattggtgatggcctggatacggttttgtatgaattgaaaaactaaatggaataagagaaggagaaaaacaggtataaaaagtctaagaattgggagagctaggacatctgattagagagtgcctaaggagattcaccatagtcctgccagcaaagattatttatttacttcaagagtttagagtggcagtttggggatagcaccaggagataccagctgtgatggcttggagaaacagtgtaaaccagcagtgtaaacaagagcagggcatgtatgagtagttgagaatggtgaataggagtatgactagacaaaagatagtagggatgacaagtttttttggggcacagtctaagttggtctggtgtccaatgagactggggcctaataaaaaggagcgtctatacaggagcttaaatgggctgtaccttgtagcattctgaggacaggcctgaattctgagaagcgaaagtggtaaaagtattgtccagtcctttttaagttggtggctgagcttggtgaggtgtgtttttaaaagacctttagtccgttctacttttcttgaagacggaggaccataagggatataaaggtttcactgaatactgagagcctgaaaaactgcttggctgatttgactaataaaggctggtctgttatcagactgtatagaggtgggaaggctaaactgaggaattatgtctgacagaagggaagaaatgactgtggtggccttctcagaccctgtaggaaaggccattacttattcagtgaaagcgtctatttagactaagagctattttagtttcctgactcgggacatgttgagtaaagctaatttgcccgtcctgggtgggggcaaatcctggagcttgatgtgtagggaagggagggggcctgaataatccctgaggagtagtagaatagcagatggaacactgagaagttatttccttgaggatagatttccacgatggaaaggaaatgagaggttctgagaggcgggctagtggctcgtactatagcatagcctgcctttgctggtgtgtggcgattaggcctggtggaactgccatcaataaaccaagtgtgttcagggtgagggacaggaaagaaggaaatatggggaaatggggtgaatatcaggtggatcagagagatacagtcatgggggtcaggtgtggtatcaggaataatgtgggaggccagattgaagtccgggccagaaacaatggtagttgtgggacttaaagagtgagttcagctgaaggagctggggagcagaaagtatatgcgtcaggtatgaggaagaaaatagattttggaagttacgagaaatgtagagagtgagttgagcatagtttgtgattttttagggcctctaacagtattaaagcagcggcagccgctgcatgcagacatgagggctaggctaagacagtaaggtcaatttgtttggacagaaaggctacacggtgtggtcctggctcttgtgtaagaattctgaccacactaaccatgcctaggaaggaaaggagttgttgttttgtaagggattgaggttttggagattaattggacatgatcagcagggagagcacctgtgtttttatgagaattatgccaagataggtaacagatgaggatgaaatttgggcttgactgaagtaacgggggctgtctgtgaagccttgcggcagtacagcccaggtaatttgctgagcctaatgtgtgtcagggtcagtctaagtgaaggcaaagagaggctgggatgaagggtgcaaaggaatagtaaagaaagcatgtttgagatccagaacagaataatggattgtagacggaggttttgaggataggagagtatatgggtttggcaccacggggtggataggcaaaacaatttggttgataaggcgcagattctgaactaacttttaagccttgtctggttttaggacaggtaaaatgggggaatggtaaggagagtttataggttttagaagcccatgctgtagcaggcgagtgataacaggctttaatccttttaaagcatgctgtgggatgggatattggcattgagtggggtgagggtgattaggttttaatgagatggtaaggggtgcgtgatcggtcgccaaggagggagtagaggtatcttatacttgtgggttaaggtgggggaatacaaaaggaggacgcaaaggaggctttggattgggaagaacggcagcaatgagatgcggctatagtccgggaatagtcagggaagcagataatttggttaaaatatctcggcctaataagggaactgggcaggtggggataactaaaaaagagtgcttaaaagagtattgtctaagttggcaccagagttggggagttttaagaggtttagaagcctggctgtcaatacccacaacagttatggaggcaagggaaacaggcccttgaaaagaaggtaatgtggagtgggtagccttcgtattgattaagaaggggacggacttaccctccactctgagagttacctaaagctcagcatccgtgatggtctatggggcttccgaggcaatcagacagcatcagtcttcagccgctaagccaagaaggagtcagtcagagagccttgggccagagttccaggggctctgggagtggctgccaggtgagttgaacagtccgatttcccatggggtcccgcacagatgggacacggcttaggaggaatcctgggctgcaggcattccttggcctggtggccagatttctggcacttgtagcaagctcctgggggaggaggttctggaggaacgcctggctgctgcggttcaggcgtttggaagttcttgtgtgctggagatgtggctggggtttgtctcacagtggaggcaaggagttgcaactttttttttattattgtacaccttgaaggtaaggttaagtcctgttgtggggtttgagggccagattctaatttttggagttttatttaatgtcgggagcagattgggtaataaaatgtatattgagaataagatggccttttgaccttttagggtctagggctgtaaagcatctcagggttgctgccacacaagccatgaactgggctgggtttttatatttgatgaaaaagagcctaaacgcttctgatttgggataaagaaaaatgagcattaaccttgactatgcctttggctccagtcacctttttaagagtaaattgctgggcaggttggggagggctagtcacagaaggaaactgtaagccggaccaggtgtgaggaggggaggcgataaaaagattacagggtggaggagcagaggctgaggaagaattgggacctagcttggcctggtgaggaggggagaggtcacatgggtctatagaaaaggaagattagaaagactcagcgacgcttggggttgggactgaggggacaggcgggagggaaagaaggaagatttgggatgagttgcactgggcacagagactaggaagggactgatgtgtaaaagaatgcctggacgtcaggcacctcagaccatttgccccttttacgacaagaattatttagatcttgtaggatggaaaaattgaaagtgccattttccggtgtttggaactactgtcaagtttgtattggggtcaagcggcattgcagaagaaaataagacgcttagattttaggtcagtgaaagttggagaggttttaagttcttaagaatataggctaagggagaaggaggaggaatgtaaggtggaatcttgcccatagtgaaggaggcaagcccagagaaaagagtagagacacagagaaggggtaggggttccttgccctccagaaaagcagagaaagggttggggcatggaaataaggaattggggcacagagataagaggttggggagcggaaataagggattgggggttcttgccccctagaaaagtgggacttgctgctaagggtgaaggagaaggggttgaggggtacttgcccctcccccagaaaagtgggacttgccactaagggtgaaggagaaggggttgaggggttcttgcccctcccccagaaaagcagagaaggggtagagacaaggagagaaggggttggggtacttgccccttccccagaaaagcgggacttgccgctaagggtgaaggaccaaggcaggtgtccctgcgtggtctgacacctttgaaacgtgggtgaataatcagagaggtgtccctgcaatgattaaacatcaagggaaggctgccgtcccagtccgtgaccggcaccggagttttgggtccatggataaaacgtgtctcctttgtctctaccagaaaatgaaaggaattgaaattaagagaagggagagattgaagtgtggtgccaagattgaaaggagaaagaggttgagggatagtgagggaagctggagaagatagtaaaaagaggccgcttaccggatttgaaattggtgagatgtttcttgggctggtcagtctgaggacctgaggtcgtaggtggatctttctcatggagcaaagagcaggaggacaggggattgatctcccaagggaggtcccccgatccgagtcatggcaccaaatttcatgtgtgtccgtgtgaagagactaccaaacaggctttgtgtgagcagcatggctgtttatttcacctgggtgcaggcggttgagtccgaaaagagagtcagcgaagggagataggggtggggccgttttataggatttgggaaggtaatggaaaattacagtcaaaggaggttgttctctggtgggcaggggcgggggtcacaaggtgctcagtggggtagcttctgagccaggagaaggaaattcacagggttaatcactcagttaaggtggggcaggaacaaatcacagtggtggaatgtcatcagttaaggcggggcagggccttttcacttcttttgtgattcttcagttacttcaggccatctgggcatatatgtgcaagtcacaggggatgcgatggcttggcttgggctcagaggcctaacagagacagcgagcagaagtacagagagagatcttggttctgaggcttatttctgaggcctttcagtttcctttaatttaaagttctggctgggcgcagtggctcacgcctgtaatcccagcactttgggagaccaaggtgggtggatcacttcaggtcaggagttcgagaccagcctggctaacatggtgaaaccccatctctactaaaaatacaaaaaaaaaaaaaaaattagccaggcatggggctgaggcaggagaaactctggaacttgggaggcggaggttgcagtgagccgagatcgcgccactgcactccaacctgggtgacagagtgagactccatctcaaaaaaaaaaaaaaaaaagcttttagcatgccaaagtgctgtaatttggaatattattttctgagccccaacaggtcaaattaatttgtcaacattttgattactcgggacagattagtgacttgacttcttcttatgtatagtttctactcaccaaaggcagtcattcctagatctctttggtagtgccccataatctatattttaaaaatatattaatatatactagtaacaaaacttccatgagaatcttagagaatatttcgtagaattttctacaggatatttatattattttatatttatatttatatttgtataaatattttgaaccgtatgctaagctagtggataaaagtccaaactaggaaaaaaaggtttatatgaaggttgagggtggggatggatggttgttcattttgctaaaggagtctcaactctgctgttttcttcaatagcttttcgtgattatttgaatcctacctgtaacttcctatgaagacctccaagaacatttctcattggttggaaaacagcaagtgttgttggagagatttctttcttagagtgcatgctcctcaaggttgcacccatgcatgttgtaaaatgtttttaggtctgaaatactcatggactgaaacagtcagtaaatagctaatgtatgtctactttgtattgttagctttttgtctatttttttttcttttcttttttttttttttttttttttttgagacagagtcttgctctgttgcccaggctggagtgcagtggcacaatcttcggctcactcaatctcagccttttgagtttaagcaattctcctgcctcagcttcctgagtagctcggattacaaatgtgcaccaccatgcctggctaatttttgtatttttagtagagatggggtttcaccatgttggccaggctggtcttgaactcctgacctcaagtgatctgcctaccttggcctcccaaagtggtgggattacaagcatgagccaccatgcctggccaggttttcatctttatattaaatgtaaaccctatactgcccttcaaggtttgagcaacctagcacaacccagaggcctgtagcttagtgatgacaaagacagccttaatattccccttagcttgacacaacttgacagtcttcttcctgactgtaggcccctgacgtctcttttcttagagcattaacttaagaatacttgaaattaaaaattcttttctttccctttgagatacaagttttctatcagccacctgccagttgtataacccaagatggtcattcctttgcaggatattagtcattgtgggaggtaggagccttagtaccaattagcaaacatagatggcgtgatcacattgaccagccttgctgtaacatcctctggtacttttctactgtctcaccccagtgctttaaaactcccaccttttgtttcactgaagtttagttcaaactctcatctatattgcactcgcctctctcctattgcagtagtctcgaataaagtcttatgtttttaacttgactggtactattgccctttgacagtgattgagagtaaaagctctagagtcagaattgccatagattcctgacttcattttactacacaagccacataacctcactaaacttcagtttccagatgaataaaatggagataaggggacttacagcatcagcggatgtaaggcacttagcatactgcttggtgcatagtaggcacctcataaaatttaagtcttatttctttgtgctagtgagtacataaaacagcttcttgatagctcttttttaaaatagtaaactattatattaaaatacaattccatttgtgtaattatcagtatgttcatttttctgatatctgctttgtaatgtgaagcctgtttagttcttgaaataaagacaaaaatgcatcagacacagtgaaagcaagcaacctgttccatatctgatcctgatatgtctagttaagttagggcagagagatcaattacttctgaggccatgttaagaaacagcatctgtgggaaagagagacaaactgaaatatttgttttcagacagccttgcaagttactccaacaaatgaagaaaactctgtgctgtttatattttaaagtttaaaatatctcttactgagcctatcctaaaaccaaaaacttaaactaaaattcaaatgcagaatttcctcttaatagatacattttaaagtgcagattgtatggtaaatactctattgtcttgaagctgcattatgaaatactgcctaaatcccttaattttaaagaaatgtgtatgaaatgatacattttccaagttgaaactgctttctttttctggggagggggaatggtaaccacagttgggaactactattttctgactacatgtcacagtaaatgtctagtcaaaacacttctccattcagtatatggtctgtctgtaaaactacttctcccccttccttttctctccaaaagtaatctgaggtaaattcacttgaattgctatctgacttttaacaatctgtattctgtttggagaccctgcttgcaattctaactgacttagaaaggtaacagtgataatatggattcatatgaaaggtcaaaagttctgcattgatgttccattcataaatacagataaaatagtggtgtttcttgtgttttggttgagtcattacctcttacagtctcttcactatcattatgtttcctgttaaaggagactcataacattaggtttacagttgacctatgacaatgccagggttaggggtgctgacccccactcccctgcacagtcaaaaatttgcataattttaatttttgactccaaaaacgttactaatagtctactgtttaccagaagccttcctgataacataaacaatcgagtaatacatattctatagttacatgtattatacataccgtattcttacaataaagtaagctaaagaaaagaaaatgttaagaaaatcataaggaagagaaaatatatttactgtttattaagtggaagtggatcatcatgaaggtcttcatcgtcttcacgttgagtacgctgaggaaggaggggttggtcttgccatctcaggtatggcagaagcagcacaaaatccacatataagtggacctgtgcagttcaaacccatgttgttcaagaatcaactttatctttttagaatgtttgctcttatctccccttcctgcttgaaatagttttatgtttcagggaggggttacaggaaaaagcagagcctcctcaactgtgtgaatacagataaaaagacatattgtggtttatgatgtctagatgcccacctggagggaagggaatttaggagcaaaataaaaagattaaaaatctaagtcaactcagaaataagatatgccaatgatgaagaaaggatttaagttggaaagttagttgttatggcccccagttgtacatattttatcctaaggcaccatttggtttaataaaatgtagatctgaggctgttcttaacctatcagtttcttaagacttaattataaaggttatgttttcagaggacaaaggcattattcatttgtctgtgcttgtcttccaggtttatcttgcagattatggactttcctacagatattgtcccaatgggaaccacaaacagtatcaggaaaatcctagaaaaggccataatgggacaatagagtttaccagcttggatgcccacaagggagtaggtgggtttcttttttctttttcttatttttatttcagaagaatgattagagacaagggtaatgaggctgcatgaaatgacctttgcatagtcagtttgaagcataagagcactggtgaggtttttatcaaaagtaatgaattcctgttatgccaatgaatatttcttctaacagtggaaagaaatttagactgtgacaagtggtgaaggagcaaaagtgtgtcaagtaagcaaaacttgctgctcattttagccagaaagccacagtttgtataggtaaaacttggaggtcagcagtgaatgtttatactgaagtgaatattacagatttggtaaagttgcatgtgggccaggtgcagtggctcacacctataatcccagcactttgggaggctgaggcaggaggatcgcttgagtctaggagttcaagaccagtttgggcaacatggtgaaaccccatctctacaaaaaaatacaaaagggttggcacttgcctgtagtcccagctgcttgtgaggctgaggtgggaggaggatcacttgagccaaggaggttgaggctgcagtgagccataatcacaccactgctccccaacctgggcgacagagcaagacccctcagaaaaaaaaaaaaaagttgcacatacgaacaattattcctgtttttccattgtacctttaccaaagctttagaagatacatctctcagcagtaaggttattttttctgaaaccataaagtgttaatttgtggaaatctctcccagtcgcctttcatatatcttacttatttaaactcactttgatggtattggaaacacatttgcaggtaaattacatacatagtccttttattggatattgattgtactgccttgcattccaaggcagacttaattcaacaattccctaattagttaaagtcataacctatgtcttgtattcatttaccattaattaaaccttagctgtttattacactgcagtccaaatccaatagccgacccagaaagccatggaaaaggaagtaggaggtcaatattgaaaatatatggtgccgagtcccactgatggttgctttgttcacaatcaatatggtcaatgcaactgtactttcttagttgctctgtcagcaacacaaaaagtcaattctaatgttatgctagtgaaaaaatggtgattattgaaaaactttggctttcaaaattatattctttgtaaactttgtttataaaagtattttcaaatatgctaaaccaaacaatttttaaacagttttgaaaggaccacatttttactaaaagacaattagatatttgcacttcttaatggttgttgaactgttaccctaaactgatgccttctaacaagttttagttggtgaagacaactgtatattattgccttttctattaaaaggaccattgaccatgtaatgtagagggtcttgatcattttgcagggcattaaaacccatactagcttaaggtaggccaatgcaaaagtaaaacaagtataacttcttcctttcagaaagattcataggcttgattttctgaaacggaaattatcttttatattcctgatcaaagtaaaagaaatgactacattttttttcaagtatagtttggttagaaaagtaataatcagtaagaaattttgtagtgttgtgtgatttttcagtattcatattgttaataaattagtgagaatttaaagataatatgggacgtatcttacattaagaaatgagaattaaatgctcaagaaatgtaagaattaaatattttattctgttacacctaatagaatttttagaaacagtaagtacttttttgataatggtataactggaaattcatcatacaggttcttaagcattggcccagttatattaataatgataccaacttatgtttgagtcatttatttcaactggtagctctaaactgctctgatctagttttgagtagtggaattgctaagaaatcactgtgattgtggaaagagaagtagagtttttttgtgttggtatggtcagtgtttggactgtggtaaatctgaaagacctattcaattaatttcattgtttagggtgtcgttttcattgtgttgtcttcttgaaagatttgaacacatttttattttttagtctacttatattttttattctaaaatcttaatacatgttgaatatgttggtaagatttcaccaccctcggtctttggggagaagactgaactgagaatgatcacagaatgatcacagaaagatggtgttacatccctgggggaggtatattcagggaagaacctacattaaatatttttgggatttgctgaaaagttatatgatagaatgaacattcatttttatcaaaggttttaccagattcttataaaatagtagatttccttaatgcattttaaataggatttacactaaaattctaggcatattgatatatatatatgtagatacagatataaatatagatatacacattacatatatatgcacatatgtacacatatatacacacatatatagatatatacacccacatatatatttgctgacattttaatgtgaagttttagtctgggatataaaatggaatgtatgacatcctcaaatgtctgaatactgttcactcctatgttttacatttaattttccaaagcaaaacatttcagttgaggattttattagaaaataaataatcatttagccatatctagaaaccagaataaacaatgccataaagcctataggaaaatgcaggtcagattcataaatattcatgtgtttactttcagtacagccactatgtaatctcagaaaaatctttttttcagtccaactatgagatcaaatactgaggaaaaatagtgcaaaataaagtacaaaaagcaaaaaaaaaaaagtcactaggatatagaacttctaggtgccagagcatttgccaagtgtcaggtctatttcttggtcaggccaagagacctgaagagaaatactcaagcttcaatgtaaaactgacttatgagttagccactcaatagagactgctattagcctgatcagactgtctgttctgtgctactttttgtagcaggttatttaaaaactcaagctaaatctcatttttctatggattgagtttttataatgaaggaacttgtataagctgccattcagtcattacatctaagcattttctaattcaaatttacataaaaggagagtagttgaaagggaaaaaaattagctattatgttattaccaaaagatatgcatggagatgtatcgtgatggatggacagatggatgaatggatggataactattcctagaactcctgtacatctgcatatctgtatgtttttttaaaaattgtgtttattcttccaaactcaattctcttgtgtgacctacaggtattttgtaagtggctaaagtgcatcatttagtataaaattagagtaatatatgttgggcttatttcttctataatttttttattctttataaaaactaacatgtataaacactgacatattttgggcttattgtctgataattaaagagaattatatttgtgtcaaatatagtattttaaaattggttacattcttagtaatgttaaaaagcaatatttgaatcaatgtgtggtatagatttttgtagatttttctactcactgaggcatgcagtcaatacctaatttctctagagatatactgcatttaacatattgagcttttttaaatacttcagacctgtgcattgagtctgtaatacctatcttaatttgacatctttgatgaccataaaatatgatatctaaattgtattttaaatgtccatttatctaatatgtttagtatcaaagaaataaatatattgcatacttttttttaatttttgccaattgctacggtatgtgaaatccaagtcttgtgttatttctttcatggtttcatttcactctaatctagcactccaacttacaaaatatatgtgaaataaactgagaatgtattttcgtgctaccaaacttggggaaatgacatggtttacgcaatacttatgtcttggccttttgattgggttaagaatacttacattggccaagtctaagatacatttgctctattgaatgacttttcctaagtttcacacacacaaaactagggcttaatttaaaaggtactgaaaaaataagagaggcctgggtttaatattttatctgaaatatgacacattgcatcctaatatttcctgatatcctttttgaaattgcagtaagtcatggtcaccataaaatattctggatctttatacatcagaattgacaaaatactgaattacataggttaccagttggaaaactaagaatagactttaaatttgttctgcagatagtcaccattcactttgtcaggtgaacatcttattcagatgttttctgctttcttattgtctttctgagcacacatattaatattttgggcatttgaactctgcttgatgcagaaattttcaagttcacttcattatttcctaccgaaccctgtttttcttcatactccataatgttactcggtataagaaataaacagaaaacactttaggcaaacagggagataaatcttggaattaatacttagacttttctttttctcccaattcctctttcagtccatttggtgaattgggctagttaattttattccagtttgtctttaaaccaaggactagttcgctaagataacttatctgttgttcttataccagtttagaaggaccgtttgtcactttataattaaatattttaactaaagatccttctttattggaatgaaataacttgaaagaaatagtttcatgaaaggatagtaacatgaaaaatttggtcagtgctgcagcttagatatccagatcttccactcatttattccttgccaaaacaactatttttgtgtcagtatgtcttggtgctttaagtttaaatgcctgcttcaaataccttcctcactatggaagtcctgtgtgtaatgttgtttgaatggtattaaaactaatgatggaggcaaagtaattattatttttttttctgagatggagtctcgctctgttgtccaggctggaggacagtggtgctatctcggctcaccacaacctccacttcctgggttcaagcaattctcctgcctctgcctcctgagtagctgggattacaggtgtgtgccacaaagccccgctaatttttgtatttttagtagagatggggtttcgccatgttggccgggctggtcttaaactcttgacctcaggtgatctgcccacctcagcctcccaaagtactgggattacaggtatgagccaccgcgcctggcaacaaagtaattgcaagattgagcacgggctttggtttttgaaagacttggatttcagtgctgagctctattaatttttgctctgtgatattgaccaaattatttaacctctctgagactccatattgttacttgtcaatagggctaatacttactttaaattgtttgaaagatgagatgaaataataaaaagcaggtagagtgccaggcatagtagcggctctccataaatcacatcaattgtttttattttaattatgcgttctactatcagccatttctaaaattttctttctagttaaatagaatttaaatcctcacctgtgcctatttctttctaattgtttttactttggcaatactttataatttagaaatgtagaacatttgagaataccacaggctttcaacaaaaagagtgatgtatattactgcatattggtaagctcaatataagttagatgctattaataatatttagaaactaacttgagaaagtttagaaatctaaactaaatctcattacagttccaagcaataataagtaaacacttcattttaggacatctgcatgaaaatatactgtccataattacattaattaccaaatgccactgaagaaccctatgtattacaataaattgtgcaaatacatgactcagaaacaaaacagtgcataatgtattttctattcaaatgaatgaaaatatattaaaaagaaatacattgcacagtatcatctgattttagagctgaaaatgtaaaatattagtggcagggatagaattggatctcattcctagtccagagctctatttactgcttcacttaatatgttttaaaatgaatttgaaaattgtataattaaagaagcaactttcaaattaaaaaaaaatttttatagttagacattaatagtctcagactataatcaattctttgtgtaaactatacatgcatacatagattttaatattgtcatctagaacatttgtttttaattaatttaacaggtattaaaattactcctctgtgtacagtagatggaaagaagacaatcattggcaaagtctaagattttaacttcactaaacattcaaacttttcaatttgcttttctgagagggaatttcaggtagaggtatgtagtcagaaacatttttagtcactcttcagtgtggggaaaggaaagggtgactattgggtgttctttttatcactgcatgcatttatgcaggacttatcagaaacagtggcaaaacattcacctaacggtagttattaataccgatgtgcaaaaaagaaaataaaagattgaaaaatgtgataatgtattttaattaggtaagaccaaactataatagtgaagtaaagttaactctcaaagggctatttcaaatgaagaccagtttatgaaagattggcttcagaaatctaaatgacttgtcattacttacagcttcatatcaattaatccctcaattggggggtagggggaaatggctaggaaggttcaatctattttaattctgattatttttcctcaaagggcctcttgtgtgtagcttatatcatccaaacactgtgccagaatatcattttttgaaaattagaggatatgagattttttaagtgatggtaatcaggaattgccataatagaaaggagacttgtgaacacatctgtacaagtggaaccattccattattaatgggagatttattactgaagaaatcactacagaacactgtggtagagattgtgtttttattttaatatgagagccaagtcttgcattaggacattgttgaagcttgtgcagaaagtaaatggcacccatgggactgtagcattctgctagattgaagggcctttaataatccaatacgctaatagcagttagagtgtaagagctaatcatgtcttctgcttttataataacttatacatggtaaccaaaagtagttacgatgtgttggcatcattgttcttagtagatgactttttaaattaaaaactaagttcactgagtaacttttcagagtttatttcatgaaagataataaaataggatacctgtttatagcaggtttaacagccacttactgctcttaggagattatatatccctacacagatgaacattcgagtaatgacagaaatgtaaataccagcctattgttttataacaattttgaatgactacaaaaatgagtttattttacgggtatttgctgatgttttaataattatttcagtggtttgttaatatgtatcagttatatttcatacatttcctaggtttcattgtccatcttcttatataaggtacttataaatatatataaattatgaaattagactacagcatttaataggttgatataaaatgatacaagggcctgaaaatgtgcttttaacgtactttttaggaaaaggcatcttattctaaattttgaaggcctctatttggctctccccccagcctctgataccattgcctccgttttatatagatatgggaccagaattttagcctgctgctgcttatatctaaaaataatatttgtaaaattatccaaagcagtagatatatttttattgtattttcatgtgattgaaaaatcttcagaaagaccctttttttaatactgcacactagatggcagttttgtcatattcttccaacttcaaatgctgctagtgtgagtggaacaggaaaggccatcaatgtttagtctgcactcagagggtctctgcatgaccaatgcagaccctatggacttcctggaacatatgttagtaatttagctgcagacatttatttctttgttttactgcttggctctttgagaaagtgttggtgctgggttatgggttgtctggatcatgtcagaggccatggggatcaagttcatgtgacaggccagactaaggaaagatgaagttggaggaggtgaggaaactgacccttactttcaacagcaaccagtcactgcctgtctgtggactggggccaaatgcttgggcgtttaagttttattccagctgaacaaataaaacattttgcctatttggctttttcatatttcatcagtagtagttcaaccaaagatttctccatttctcaaggacttgcttatcccttatctttctctctaatgcttactcctatagccttgtccagacgaagtgacgttgagatcctcggctactgcatgctgcggtggttgtgtgggaaacttccctgggaacagaacctgaaggaccctgtggctgtgcagactgctaaaacaaagtacaaattttcaagtatttcatcatgtactgcaccaggtctgaagggatacattaaagggagctaacaacacagagaagattggcattcacccaacatgacaaccaaagcaaatttctttagtttgaaaaatatgttttaaaaaaaccaaacaactaacacataaaatccattaaggtaacattgtaaaaagacatgtatttgaattacagtgcaaaatataaagtgaaatatctgttcttttacatggtatttccaaagcttagattctaggtggtagtgttttcaaggaagaatattttcaaattagcattgtacaagtatgttgaagtagtctgagcttggtacgattgatattaactgtgtaaaacagcactatgaaatgggacaaatagggcttatatttttcaagtgagagcaacatacctcttatttctgtcttggaggaagtatgttttctttcttaagaaacaaaatttttacatgagctatttatatgagataatcttgtagccacataaacatttttaatattctacattcagtttttattacctggattcggctagcataaaaattaggtcagactaagaacagggtgtgttactgttttacaattctctcactgatcaggcctaagaaaaagtcaattgcatagagcacagaatagccagtttttcattatataccaagatatgctcaacagtagttatccacaggtagcaaaagcagcagctaagctaagttttaagtaggaaaatcacaacagaagagtacaaagccaggggaaaattagctgattcatagaaatctatctttaaattcagtgtggcatcagttcttaatactgagaaagattagcctgcagattcagaaaaatacatattacatttgtaaatactgacatatatgaaacatttctccactcagaattttgatcatcctagtcccttacccaaaactaaaacatttatataaatctatattagaactaaatcagttatttactgcagtgattgatgtgtccatattaactttcatgtaacatttcgaaatatgggtcaagtcaaaacacagtgatgtataaacagtttttgtatttaattttccaactagtttacctaattagaatactgtaataaagtaatgatgctattttaaaaaactaacattttaattctaatgattatatatttgttttttgataagactaatatgacttgctttaactttttatcaatatgcatatacagatacattcattataggtatctataatgaatatacctgcttatgcatatttataataggatgtcatataaaattattattttacatgtataatgctaataaatcaagcataacttctatttacattttggggactcttacatatgttaatatcttcattttgacttgattaataatgtaaacctatagactagtaaagccaatatcatattatgaagtttataattcagataaaccatagacattttcaaacttattatagtacataatacataatcataatttattcaacttgctgagaaggtatgacactgaaattccccataagggtgtgattgtatattcagccaagacactgtatctcccttatgccttttattttcctgacatagcatgctgctggatcaatgtgtgtattgttgctactctgcctatgccagaggtggtgactcactcacacatataaataattttagttgaatgtttttataggttgtgtattccttacttgaaaggcttgggaccagaagtgttgcagatttcagatatttttagattttggaatatttgcattatacttaccagttgagcatcccacaaacctgtttaatcatgggacagcataaaatattgcccagtggagaacaatgcacatatatacttagatacaatgtttgcgtgaattttttattgttgtttttgagaaaaaaaatcatggtaaatattactacttctgtgtttctgcatacataaactttgagttaaagcatttatattataattcctgtaattccatcttgtttagtattggggcccagagagcaataccccaaagtgtgatgctttggcatgctgagacctttgaactgaaagagactggatggccccagaagccacctcagaagccaagtctcactctgaccttctcctgccctcttgtttcccatcccttctcctcccaagaagagagtcatagaaaccagaattcctcttccccaaagcgggttatagaaactagaacccctgtaccccaagcaaggcattaaacttaggaaggtcaccctctcccttctccctttaagaccctcattccaaaggggtcctgccccatccccaggaggaataaatgctacatacatcaagaatatggggccgggcgcggtggctcacgcctgtaatcccagcactttgggaggccgaggcgggtggatcatgaggtcaggagatcgagaccatcctggctaacaaggtgaaaccccgtctctactaaaaatacaaaaaattagccgggcgcggtggcgggcgcctgtagtcccagctactcgggaggctgaggcaggagaatggcgtgaacccgggaagcggagcttgcagtgagccgagattgcgccactgcagtccgcagtccggcctgggcgacagagcgagactccgtctcaaaaaaaaaaaaaaaaaaaagaatatggacaggctttgctggatccccccgccccagttcagtaccattagaacatacccttttgtccagtcacattcctacacagctgtctattcttcatcaaacctaagcataaagatagacttccttgggtctttggtcttcatttctcaagtcgtgtcatataaaactttaattaaataaatttgttatactttctcctgttaactggtcttttgttataggaatgttggctgcaacccttatggtgggtgagaaaagagatcacacctttctgcccctacgttagtctaggttattgatataaaattagtttgtgggcattgagggttctcctctacttctgcttactttcctatccattatagttgggtgacaaaaaaaaaagcattgaaagtcacaattttggtgacctaccaacacatagagtgttttgttttctagtcaaaataatcacagggttgaaaacatgttcattgtgcattaccttattttgttttagtctgttggacgagctcccccagtcagtgcttaaatgggctccttctggaagcagttgctgtaagtcaaataataacttcaaccttctcttacgatttacaggttgccacatttgtcgttatcgtttggtagcttttgcttaacccacttgctcctattcccatcagggtgggaaggagggaactcttcatgttgcaaataagttgctaaagaacacaatgtttaaatcatctttaacattagaacacaaaaaacctcaaaagaagatattgaggtggaaaattctaggttctgcttagtgcttttttttttttttttaagatctctattttgagaatcatgcacaggcttaatagtcaaccgtatctggtatttctagagttaagacttcctggttttgttcctctatatattgttgaaagaagataaagttgacctaaggaaaaactacttttcatcagtcatttaaaaaaccaaatcagtaaacactgaatgctgtttagaccagaattatgctgactgaactgccagcaaaaaaaaatttttattagcaaaggcatatgattttgggatttggaggtatatttcatattttcaagttagtatacaatggaatttttaattgacaatgttatcaatacatattgtataaaatagcacgtcaactagtaattacccacattcctgtcattttatgtgcatacacaacatgttattcaacactaatttaacaattgagttagactgtcttatacgaaaaagccagtgcccactatcagtcttgctttttttcagagacagataatcagagtgaatcttgttttctgtttacactggacaatctcaaagttagctttgagctgacttctgaaagtagatatgtacactgacctctctagctaaggtctaatagcatctgtttccatctggttgagaattagagagttaagtcatcttaaacttacattcacagcctttctttcactggaaaccaaaattttcatttgtggaggaaaggaaagaataagccagttctacttcccctctccatttgcaagtccaataagcctatccccacatgagtcttttgttttcccctttctctagtacttttcatcggattgagggagccacacaggagagatcctcattgtgggaatgggttgcaagatgaaatttttgttttcataattgtcaataacttggtcaaaatggcagtactcctttatggctaatattcttaatggcattttttttttttttgagacagagtctcgctctgtcacccaggctggagtgcagtggcacgatctcggctcagtgcaacctccccttcctaggttcaagcgattcttctgcctcagcttcccaagtagctgtgactacagacacgtgccacgatgcccagctactttttgtatttttagtagagacagggtttcaccatattggccaggcctggtctcaaactcctgacctcgtgatcccccccaccttgccctcccaaagtgctgggattacaggtgtgggccactgcgcctggcccttattggcacttttaccaagttgtatagttcatcttttaatcaactggacagaaagatgggaagatgtcattaacatatatatatatcatatatatgtgtatatatatcatatatatgtgtatatatatcatatatgtgtgtatatatatcatatatattatatcatatatatgtgtatatatatcatatattatatcatatatatgtgtatatatatcatatatatatcatatatgtgtatatatcatatatattatatatcatatatgtgtatatatatcatatattatatatcatatatatgtgtatatatcatatatattatatatatctcatatgtgtatatatatcatatataatatatatgtgtatatatcatatatcatatataacatatatatgtgtatatatcatatatataacatatatcatatatgtgtatatatcatatatcatatatatcatgtgtttatatatatcatatatcatatatatcatatatgatacatatatatctcatatatgatacatatatatcatatgatacatatatatcatatatatgatatatatgatatatatgtgtttgtatatatatctcttacctttcttgtcaatcctgcagaaaaaggaactgttcagtttagggtaagaaagcccagatgccctgaattgtacaagacaaatgcttgtgggcagtgtatattatgtcatactctattgttaaagatttgagtcagatgagtaatctagatgggagacaagcccagtttttgtttcttagcacaaaccattttattgaatccatactattatttataaaatgcagatttctgtttctaaagcaaaaagtgttgaaactttaatattacatgaaggtctcttaaattaggaggttgtgcttaggaagaacacaaccatgaaaatgaaggaactgatttacaaaagtttattaccgaaacattttatgaaataaaacagccagaagtttgcagcatacatgtccaactaagcataataataatagtttcaaaagtttctatctcttgatagtaatgatacttaatacttcactggcttaaaaagcagatgattaaaaaaatcataatttcatactaaaggcattttgctttatagttctggcaatatgctagtaaattttaaaatgtacttaataaatccagatcttgaaagactaacatttaaaccagtattacatcacaatatctacgcttcaggtttgtaataataaatttataatggaaatggctctttttattttctccccctcctacctcactggtacctcatttttccaaaccccagtcccatgaaggctttgcagcacagctgctatcagttggtggagtgccaggagttttccattgtcttgtaacagtgatttgttcccagcacattcaactctcttcctcattttggatattctggttaatggaattgtaatatgtaccaaacttggcttaccaatcttcacaggaccataaaacaaaaatatttatattaaaatagtagtgaatgtaatttaattttttaatcatccctttagaaattggatacccccgagcccttgtgaaggggctgcatgaagcatcagttataaatatggtgataaaatagcagcacttgctagttaacagagatctggttgaccgaatgctagataacagaatttgataaaaatagatgaaaaaaacaggttgcataattgctacagtgtcaaggaagaaaagcccagaaccaagagtttacattttaaccacgttagcttcatgttcccaggaaatagctctgtactatatggtgaaagtggtcactcttaactttaatagggggaaagcgatgatgactattccttttgaaatttttctctatagggagtgaaacccagtgcctctgcagttttcctttcttttgagtggaggtaggcctagaggggaagtgaaggattaggaagtcactcctgccaacgcatgaagtttcccaggttttcccaccatggatataagcaactaagtgagaaagtaagaagtacttgagtttgagtcagtaatatatttttgaaagggaaaggcatatctaaacatctctgtgaacaaatgaaaacatgccagtttttaaatagtatttggtattatcaccacttctattccaattttaggttgaacctcaacatgaaacagaaatgcaagctacaaatattttaatgcagtgatgtttgtaactgttggttactaattctgtttgtatttaaaagttggtagttcctaacctttttggggaaagggggtttactatgtagttctaggggaacatttctttacactagagaaaaaataaaagatggcaactcctcctcccactgctctaaaatcaaaaacacgaggctgtgtaccaggctagctaggtatggaggacatgagggaggtttcatacattctaaattcaatcttagctaacaacatggaattcaaggtcctttctaaatatacggttataatcccaaaatcaaagccttaattaaaatttgcagtttttttccttagaaataaagaggtttataataagtaacactttaactgaatttttagaagttcagcataaagtgtgaagtatggtcagttgtattatttatgtagtccttaatagttgcacctcataaatcaaaatcactataattattacaatatacttcctctcataagatcagtgaattataagcgtatcaacaaaaatatgttaaaaacattactagtttgtctcatcaattctgtaggtcactatatttcagtcatttttgaatatcatttaaaaagttattttcattgaattgttcatttttagtttcttcaggagatgtaaatgtgtaaaagacaaagataacaaagattttgagattactggagtcttgacaattcttgccaattgtgaatgacatgtaaaaaatttaataattcacaggtgaaatagcccaatttttggtatgtgctcatagtttagcatatgatgaaaagccaaactatcaagccctcaagaaaattttgaaccctcatggaatacctttaggaccactggacttttccacaaaaggacagagtataaatgtccatactccaaacagtcaaaaagtaagtaacataatccctgctatcctatgattaccttctatgatacttttctatcgaatgaaattgttttaggtctcaaaatgagtctgacagctttcttcttccttatatttaactcccattttgcctaactcagcaccaagaaagtttgttccaagttcttttgacctgttgtctcacagagaaaaataggatctgtggcctactatgtactatgaaagaaagcagtcactactgtcatagagatgtgactagggtaaaggctaatctgatgttactcatgagaaagccatcatttgcttcttttctccaggttttctttagatattgccctgtgtttttgcctaccaatttggccataatttggtgataacagtcttcgatttaaccaggttatttgtatgtgctgatatttcaatccatggaaacagttctttacagaaaataaaagagtttatgccagagatctaggttaaaaaaaatcattttttaaaagttacacctcttcttttagtctgccatcttcccaaagaccaacaccaacttaaaaaaaaaattaagatttcgagcatttttaagcgggtggtggaaatcttagactgccgttattagcaagaatagtggacaggcaactcagcatccatgtcttccttgaccactatccgtatgcacaaatagagtgtggagggcatttttttcctgatgcatgtacagtaagatagggtcaggatgctattcatttttaatatttcttatgaactttggatcatcacacgtgttcatgagccaagaatgcgggatgcaaactaatgtgactgataggctgctagatgaatggtgagtcaagtatcagtgcacagatggttctgatttgctgaattttgtagttgctgcaactgaagacataaaatatccttctagtcataaattagctctttggaagcaaaaccttggcaccagagctttacaaccttcaattagtaggaaaagaagtatttgaatgactgtggtattgacatctgtaggcctgcatagtaatcattcctaatagaagagaatatctgtttgaggaggttttgcatggctaattaactaccagtgagaatatgtaattttttcatgatctcctgattgtcacctttctctcatgatacaattagattttattgtagcaagtgcctcacaaaccaattgtcagcactatttacgtattgcagaaggcagaacaagagttcatgtttaataaaaagccactggattttgatcttggtaattactgagacttgttttaacagttttattgacttttgtgtttttatcacttttgcaacaaaacaaagagccatttccttgacgtagtattttcgttgcaataatggtcaccacttaatctatgctaatttaagtagatttttccctttttgtagtttttcagtttcataaacttaattgaaatataaaagaagccattttaaaaactgatagctatatcctctgatataaaattctgattattatccaccagaattttcagtttcatcaaattaaagggtgtttgttgtgaaaccatttttatatgtagagaatagaacataaaacactttttccaatgagcctccatcaagaatattttatcccttttgattattttgattatgagtaaaaaaagcacttaaaaataatacatgcttttaagacctacgctaatttctgttaagaaatgtatgtgatcagcctggatgtatagacagtaagatgatttggggatatattttgcagcagatcaatatttatttatttattatagtattttaagtgcatacatatatttaataatgatagcataagatatgggctcaccatatgtggctaaactttaagtatcttaattttcaaagtttacagattttgcagtgctacaaaaaccaaacctgaaaatgttcaaatgcaaggtatgacagtataaaccgtcctgttcccagttcccctgaatgatgcacgtataggatgatttccacaatagattgcttccataacaaaaatcattccaaaatgcatatcaatcacatggctccaaatttctttttagtcacagacagaatgctcttattagtaactaaaatcgtttcttgttactttataaatgggtttatagttatatgtagttaagtatttagttatagagctgtttaacagagtagtgaatgaattctggactaatacattttttggacaaagatattttaaaagaagacattggaccagaaaaggtatacataaataaataaaatgttaccatcattcagtattcaagggaaaaaagttgtaactgtttacatttttaaatgttattttgctaataacaaatgaaacttatacagagggaagtaacagtatttttaagaaaaacatattttgattaggtattagaaggtagcacattaccctaagaatctcaccaaacttacatcacctttttgcaaaagaaaaagttttttttttttttccaatactggattttactagacattataaactgttctctgtaaacctggacagagaattcctcaaatattgttattggagttaaattggaaatgaatttttgtcaagagagtagtgatattgatatttttttcatgaaaaacaaatcttttggggtatttgcctgaatcaaaatgagggatgtaaaactgaagtcacttgctagtagttctgggggctcctgagttagcaccgccaatcaaattagaagactgtctcatcaagaccatcacagtctctttatgccacccactaggatttaatttccaaaattcactgaaagaaacaatatttcaataagaatgcttattgaggtgagctaaagctctagaattcccagataagaatgttaaagccaagatggaaaacagcgttactaaaggccccattacgacccttgaataagctatttttcaagaaccagaggatccttttaatcgtttatcaatgactcccaccttattatggtgcttgaatcatatatacaatatacagtaatatactataatatgttagtatattgtaatagtgtagacacttgggcataatgagccctcccatccttcctaaatgctttagctaggcagagaagtagctgcaggtcagagctaaaaggttgtcccttcattcaccttaaatctgaggctcccatagcatatccagagttgaatatattattattggtagtagtagtatttgtatagaatttaacggtttacaaaattttttcctaagctttaagtctcaaaataattctatgaacttctctttattttctgtatatgaggatagtgaaatacagattcttaattagaagcacatttttggtttattaatttttaggagtccaaaggtattcttgattttatagaacagtgtgaagttccaatggaaaattaaataaaaactacctcattttcatacctactttcttgaaaatatcacacatttgtgtagtatccttctattataagggatgcccagggtgttttctgtatttttctatctttgagaaaaagtttcactgtgttcactatcatctacttcactcttacaataaaagtttccttagaaataagattttccattaattggctatcattttgtttagtagctagaagtgcccacggcagtgcagcctaaccattcagccaactaaaagcaaatccaggaggcatcatctcttccaggaactttcacagaggagtgaatatattatactgaattttgcttatacgtcagaggctcccagggcaaaaactcttaaacctaaaatgcctagcatataggaagcactaaaaacttcaatatcttagctaaaaataaaactgccagcaaccttgcttctgggtatgtatccaagggaaataaaaccagatgtcaaagaggtatctgcactcccatgttcattgcaacactattcacaataatcaagatacagcacaacctaagtgtgtgtcaatgggtgaatggataaagtgtggtccgtaaccacaatattatttgtggttatagaacacattttctttatccacaaagtgtattttattcatatatattgtgtctgtttgtgtatatatgtatatacatatatatgtatatatgcacacatatatacacatacatatatacatatacacatatatatatacatatatacacacacacacacaatggaatattattcagccataaaaaggaaatcctgacatttgcaacatcatggatgaatctggaggacattatgctaagtgaaataagccagacacgggacaaatactgtatgatctcatttataggtggaatctaaaaaaaataataaacttatgaaagcagagcatagaacagtatttgtcgggatgagacctggggaaaatggggagatgctagtcaaaaggtacaaactttcagttataagatgaatgagttctggggatctgatgtacagcatggtgactgtagttagtaatactgtgttgtattcttgaaatctgctaagagagtagatcttaagtattctcacacaaagaaatggtgactaacgtgaggtgatgtgttaataacttgattgttgtattcattttgcaatgtatacatgtatcaaaacatcacattgtataccttatatatttttattgtcaaacatatctcaataaagctgggagggcaaatctcaccctttataacatggaacacattttcacaagaattggtaagccaatgttttaataggataaaacagtacgcaagaaccatgggagaccctttgtttcacactaatggtatcaggtacatttattaccaagatgacttcagcagaaagtggctcagaagatggtgacataaattttcccagtagtttgggaaggttgagtggtgaaaataaagaattcctgcatgattaagaaacatttccaactttcaggttactgaaaggcagtggttttgagctgggatcctggaggagggtagaatagagtggtgttgtgacaatttaggcttagccacaaaacaccagcatattttaaagggaaggagtgaacacacttggcgataaaagctaaaaattgagagactacaaattaaggctctgcttgcccagccaatgtaattcattctctattttggcactggctacttcactatttcccctttgtgctgttcctatcttctgccccctgtttaactcatgaaaaaaaggtgatggcactttcagctgctataaacatgaagctgctgaacaaatacttcatataaggaccttcgctgtagctttcaatcttccaacagtgttgtgggttctgcccttctgtttctgagtctacttcaaggttattgacagtcaggcatcccccagatatcatcatggtgtgaaaaagaaaccttagagacagcaagcttgttgtagaagaacttaacctctgatactggtacacagtattcgatgacatgaactgttattcatcttgctcaaaggttaaactacctgcacaaaaatgtaagcaacatcacaagctccttttatatattcacattaattaggctcacttcaatgatagaaaactaagattttaattaataagaatttaaactacaaagatatactggatacactcccagcaaaggttaataatgaattcatgtgcagctttaaaatgtgacaattttctctaaaaatgctgttttcagtaagcaagttatctgtagagataatttctaaggagtacagtgacactaattttattttttattttattttttattatactttaagttctagggtacatgtgcacaacctgcaggtttattacatatgtatatatgtgccatgttggtgtgctgcacccgttaactcatcatttacattaggtatttctcctaatgctatccctcctcccttcccccaccccatgacaggccccagtgtgtgatgttccctaccctgtgtccaagtgttctctgttcaattcccacgtatgagtgagaacatgcggtgtttggttttctgtccttgcgatagtttgctcagaatgatggtttccagcttcatccatgtccctacaaaggacatgaactcatcctttttaatggctgcatagtattccatggtgtatatgtgccacattttcttaatccagtctatcattgatgcacatttgggttggttccaagtctttgctattgtgaatagtgccgtaagaaacatacgtgtgcatgcagtgacactaattttaattggttttgtcccattgatgagaaagggtctggatcttgccaacgactatagtttttctgtaatgtccacttgctgctttcctctttatttccttttttaaagcttggcaagtttagagcttttaagaatctggacatatatgcattttttagagaaataccaaaagttttcattatatattattacttactctataccaacaggttgattcacaaaaggctgcaacaaagcaagtcaacaaggcacacaataggttaatcgaaaaaaaagtccacagtgagagaagcgctgagtcctgtgcaacatggaaagtgcagaaagaggagaaactgattggattgatgaacaatgaagcagctcaggtgagagggttgtttgtgtgtgttttttctaacttaatgttacattagaatatgccctttgggaataaaaacatcttattttctcctgagggccaaggttgtatggttttgttaaatgagaagggacagaaaatatcctagccagctgataaaattaaagcggccagcaccagttatcatagaaacagaatagcagtaagcacatttgcgtacagatctgatttctttattctaagaatgtaatgaagtgcacttaaatttcttttgccatctatgatccattagggactcaatgtattctatacttttacattggttcctcaagtctcacccttataatcaaatataagtgaagtgtttccctgtcaatgtggttgtattttaaaatgatgtattttttacatcactcagtcatttgggcggagagtgactcacctttagcagatgactcattcaagtaacagcaaaaatcctccctaatctaaccttttttgacaacaaggagaagcatacaatgcatttattatctgcagtgaaaaaatatttaattttgtcaaaatgaccaacattttatatgatttatacaccatcatttcccccaaatgatttgaggtagtttacagtatgaaacaggataatttaataccccaccttgtataccctacctaatcaagaaaaattgatatatcaggcagctgggatattaatcactaaactgagcactgaatttggctctgaacttcttgacagccgaggcaaaaattagaagcatagtacttatgcattcttcagccagccaacaagcctgcaagtttatccagagacagaaatgctttttttagtactaatagcaatcttttacattctttcgagtataaaatagtggcattatttgttgtttcattttaaatttatgtaaggaactacttcacttaggcatattttagttcctattggtaaaattaaagacaaatcgtgcttggtgacaaaacttagagattctaaaaatctctagttgagagattctttttcaacccttacttaagtccaccaaaatcacctggtgtacagggatagggaagcactgcgaaaatactgatgcaaagaaattgattcctttttggctgtggtggcaatgagatacgtatatatagattttatcactttggaaagtcttggttcttttccctagtcagtcctcttcccccagggaatgttctgccattttgattctcatcactagattagatttgcctcttctagaatttcataaacatgcagtcatatagtatgcattcatttgggcctggcttctttcactcagtgttttttttttttttttgagatttatccatgttcatgcatgtattagtaatttgttttttccattgctgaacagcactccattgtataactatatcatagttcacatgtccattgtgtaactacatcataattcacaaggccattctcctattaatggacatttgggctactactcatttctggccaccatgaatatagttgctacaaacattctggcacaaatccttcaatggacatgtttcatttctcctgagatgtagaattgctgggtcgtagggcaggtgtatgttcaattttataaagagctgacaaatagttcttgaaagtaccattctgtactcccaccagtaatgtacaagagttctggccattccatgtcctccccaatatttggtattgtcactctttttaattttagcctttctaacatgtgtattagtgtattattgcgtttccaattattcacctgatgtctaattaagtttgagcactttcacgtttttactgacctttcatatatctgttcttacaaagtttctttgtcgagtgttctaatttttatttggatatttgtctttttattgttaagccacaggagtccttatcagatatctgtattatggatatcctctcctagcatgcggcctgcctaatcatttaattcatagtatcttaggatgtgcagaagctttttatattatttgtttttttatttgaagttcaatttatcaatattttaatagtttttttgtcgtttgtttgtttttctgtaaagatacctaagaaacctttgcctacctcaaggtcacaaagttattttgctatatatttctatacaaggctcatggttttagctttcattgttggttctatgagccatctcaaatcaattcatgtgtattgtgtgaggtggaggttgaggttctctttttcatatagtttgcaccatcatttattgaaaagatgttcctaatgaatttctttggagcccttttcaaaagtcagctaactgtgtgtgtgagcctatttctgggctctattttcttctattctacttgtctctccttacaccaacaccacactgcatcaattactgtcgctttacagcaagttctgaaattagaatagttctttaatccttttattttctttcaaaaatgtattggccattttaggtcctagtctcctccataaaatttaagaagcagcttgttagtttccaccaaaaaatgcacaatgggatattgactgggagtacattaagtgtaaagatgagtttatggagaactggcatcccaacaatgtcgactcctccagtgcataaacctggtacttctctgcatttatgtggaacttctctgcatttatgtgcattttctttaacttctctcaacagtgttttgtagtttttagtgtagatgtctatacatcttccattaaaattatctctaaatatttttgatcccattttaagtagtaattttcaaaatttcatattccagttatttgttgctggtatatagaaatagaatttattttctatttctatatcagttatatttgatatacaatataatcatgtgtcttgggatctttctaaatgtacttattagttccaataggttttattattttttaaatagattcttaggactttctacatagttaatgatgtctgtgaatagagacagttttacctcttcctttccaatatatgccctttatttattttttatcgttgtcttattacatctgctagcagctctagtattacgttgaatagaagttgtgacagtggccatccttgcttggttcctgatcttagggggaatgcattcattctttcaccattaagttagctgttgattttttctaaatgccctttatcaggctgaggaaatttcaccatatttgttgaaaaataaatgtaaataatgaatattaaatactgttttgagatcttttgagatgatcacatgattttttccctttactagtacgatgaattacactgatttttaaatgttaaatcaaccttttatttctgggataaacctccagttaggcatgatgtgttttcctgctgaattctgtttgctgaattccaactcaattcctgctgaatttcagttccatggaaggtttttatacctagactgatgagggatactggtctgtaattttctttttcttttcttttttttttttttttttgcaaagtgaaagcaagtttattaagaaagtaaaggaataaaaggatggctacttcacagagcagctgtaattttcttttgtcgtaatatccttgtatggttttgttttcagggtcattatgaattataccagttggaagtgttgcactctgttttcagaaaatgtttttgtaagatttgcctttcttaaatgttggatagaattgagcaagaaaaccatcggggctgataatttgttgtaggaaattttttaactgcacatttactttctataatatatagagtgatcattagattttttttcttgggtcagttttatatttgtatttttcaaagaatttgtccatctcatctaagttttcaaatttatcagcactaagttaggatattctttattttccctttatcatcaccaatatctatattgatgtccctctttcagttctgataatggtaacttttggtttctttctttttttagtagtctagctaagggcttatcattttcattgatcttctcaaagaccagctttggttttttttttttagttttttttttttttcaaagaccaacctttggttttgttgatttttttaaaaaaacctaccattgatatgttttctgtttcactaattctttatcatttgcttgattctacttattttgcatttaatttattctttcaagcttcataaggtgaaagtttaaatcactaattttttccttcattttttttctaacgtatatagttaaacctataaatatgtaagctgtgctttggctgtctatttcacaaattttgatgtgttgtgttttcattattaatcagttcaatgtattttctaatgtcccttgatttatttgacccatggattatttattagtatgttatttaattcctaagtatttttaaggtttactgggtatcttttttgttattgatttctaatttaattttgctgtcatcagaacacatcctgtattattgcaatcttttaaaattcactgaaacttattttgtcaccaaggaaaaggcctagtttagtgaatgttccttgtatacttatgaagtttggggttgtttaatagtgttcaaatcttatatattcactgttttattttgtcctcgttttatcatttaatgacaaaggaatgttacaatcaccaactgtaattgtgaatttatccatttgtctcttctatacatttttgcttctatacatttttgcttcatagattttgatgctgttattaggtatatgcagatagtagttatatgttcttggttaactgtcctgttcatcattctgaaatatctttctttatatctattaaatactctatcttgagttctacttcatctgacttttaacaattccagccttcctatgattaacatttatacattgtatccatttccatcctttgtttaatccacttgtgtctttttatctgtggcttttgtaactagcatatagttgagcctcgctattttataaaatctggcaaacactatcttttatttgctccatatctatttcatgtaactatatttgctccatttccatttgaggtaactattgatatagctgggtttaatctaccattatgcagtttgctttctttttgccccatttgttctttgtccctttttacctccctcttgctttattttggactgattgagaatttttttttaactatgcttctatgcttgttttttttttttttttttttttttttttttttttttggtggtcactctagagcaaggggtcagtcagctccatagcctatgggccaaattcagccaaccacctatttttgtaaatagttttattggaacatagccatactcattcacttacatattgtatttgattgcttttgttccatagtggcagagctaactgcaacagagactgtatggtcaaaaaagcctaaaatatttactctcaggcattttacaaaacaagtttgcaaatccctgctcagcacaatcctgcctaacagaaatataatgcaagccacatatgcaatttaaaaaattctactaaccacatttcaaaaagtaaaaagaaacaggtagaatctattttaataacgtcctctgattaaaccagtatccacaatggtataatcagaataatattactgagatacttacatctttttctaaagtcttcaaaatttggtgtctattttatagtaacagcacatctcaattataactagccatatttcaagtggtcaagtcatattagacagcgtggctctagaaattaccatgtgcacatttaactgatcatattacattctatcttgacttaatgtgtaagaaccttaaaaatatatacttccctttatccctcatcctttgtgctattgttgttatacgttttgcttttacatgtgtaatatatttcagaatgcattggtattgttgctttaaggagccatttttcattttaaaaaaattaagaaaggaaaaggaaaaaaagtcttaacatatcccagtatttacagttactgaaattctttattccttcaatagatcttagtttggtataatttctcttcagcctgaacaaattcctttaacatttatcatagtatatatttcctggaatctaattctgtcacctcttgtctgtctgaaaatatttgtatttcacctgcatttttttttgtagtggtggatttatattttatttctgcatttttttaacagtttattttgaagtaactgtagactccgaaattgcaaaaatacatacagcctccctatacccttacctaccctttcacccaactcctgcaaatgaaaacattttacataaccataatataattttacaaagcaggaaattgacattcatatactaccataaaatacagaccttattaggatatcaccaattttgacatgtactcgtgcatgtctgtgttccttagatattttataacatgtatggagtaaccaccacaattatcctgcagacctgttccatgaccacgtaggaattgctcatgctatagtgacactctcttcccaatcctaatcctcagaaagcagtgggtttattctgcatcactgtaattttatcattttgagtgtatcatataaatcaaatcttatgatatgtaacttgttgagaatggctttgtttcattcgtcatcatgcccttgagatcgatccaagttttgtgtacatgagcagttcattcctttttattgctcagtagtaatctgaagtatggatataccattgaagaacatttggtttctttccagtttttgtccattcactattcagtaggttagctgtagacatttttatagatgttctgtataaagttgaggaagctcccctccatttctaatgtactaagagttttcatcatgaataggtgctgaatattgtcaaatgctttttctgtatcaattaatatgatcatgtgatttttcttctttagactgttaccatagtggatgacactggtttgtggttgaatattaaattagtcttccattccttgaatcaaccccacttcgtcattttatattattctttttatatgttgctggatttaatttgctagtattttaatgaggagttttacatctgtgctcatgagagctgatgtctgttgttatctttttattctactgtttttgttggttttggtatcagggtaatggtgaccttatgagttgagaagccttcctcctcttcttaatttctggaagaaaatgtatagaattgatcctgtttctttttcacgttttgcagaattctctagtgaaaccatctgggtctggagattcctttttagctatgaattcaatttctttagtaagactattcagatatttatttcaagagtaggcaaacttttctgtaaagagccagatggtaaaaaatttaggttttgcaggtcatatggactcttgtcacaactatttatctcttgcatttttattatttcatcttgagttagttttggtaatttgtgatttttccaggaattggtccatttcatctgagctatcaaatttttgttggtataattattcatactattcctttattcaaatcccttaaatgcctgtggggtctgtagtgatatttgtttcttcccagatactggtagtttgtgttttctttccctgttagtcttgctagtttgtcattcttattggtcatgtctcagaaccagcttttgattgatcattctgtattttttaattgccaatgttattgatttctgctctaatttctatctttctgcttgctttggatttcttttttttttaattctttttttgacaaatataattgtatatatcatatctatggggtacaatgtgatgctttgatatatgtctacattgtgggatgtttaactcacactaattaacaaatccatcatgtcacatacttgtcatttctttttataatttcttggggtgcaaacagattattaaattgggactttttgtcttttctagtacaaatatttagtattataaatttcccttctagcatgacattagctatgtcccatgttttgatatgttgtatttttatttccattcggttcaatgtattttttaattttcctggggtctctttgacccatttaaaggggtctttaaattttaaagcatttggagattttcctattatttctttccttcatcttgatcttggtgtattttcttcccttttttccagtttaggtagaagcttaggctattgatttgaacccactattttttctaatgtaagtattccatgctataagtgtcctgctaaaccctgtttgtactgcatcctgtaaatatttatacatttcaattttgttcacttcaaaatatatttccccttgagacttttaataccttatttagaaatgtgttaattcccaagtatctgaagatttttttttcagttattgatttctagtttaattatattatggtctaacaatataaatttgttagggtttgttttatggataggatatgacggtctgcctggttgaatgttccagttgcagttgaaaagaacatgtattttcctgtttgggggtgaagtagtctataaatatcagctagatcccattatcttgtgatgttactgatttattttatattcctgctgattttcactctagtagttatatcaattactgagaacagagctttctagttagggagatgtgcgatgccaactctttgctgtttaatgcacagcaggcacggtcaaaagggcaagtgcctctccagtttctgaggccagagtggagggttgctgttgctctgatgtttgctcagtgcaaggtggagaaggttggtagctctctactacggtctctacagtgtctggtggggaggaagacaggtaccacatctgcttgtgttagtgcagggaggaacaggctatatggctctgccttacagttttggtagtctcctggtgggaaggaagggggaccacctcagtagtacaggctgggaaaggttgtcagagctctatctcacaatttccctaacacccagtgggatagggtatcaccttgttagtgtgaggacggtcaacagggctctacctgtctccacagtgcttgatgggggaagggtaggtgtgctccctggttagtgtagggtgatgatactcaacaggactgtaccctccctcttcaccccacccttgccacctccccaccgcccccaccatcccccccaccccgccgccccgtttccacagcacctggagagaagtaaggtacagcttctttcatggtgttcacctagggttcagcaggtataaaaagattctgtcctgtagacctgtcctcccccagggctattggttacatagagcatgtttttcatgtttgtttttttttttttccagtctgtgcatattgctgtttccagaacgcaggctcttttatggcccaggctggggtaataggaggtactaaagtacatggcgggtggagactcaagggagggtcatttttagaattttcagtgttttgataggtgctttttgtccactctttaattaccagaataaggtgggatgcttactctttcttgtctataactggatgcccctcactttgattttgaaagcttcattgaatatggaatctattctttcagaactttaaaaaggatgtttccatcttcataggtctgtttttttttctgctaagaagttagcagttattcttattggcccatttataatgtatttctttctgtggctttcaagatttgcttgttatttttggttttgtaaggatggctgtcttttgtttattgtgctttgggttcgtagagctgcttttatctgtgggttgatatttgtcttcaaattggaaaggttttgtatgatttcatcaatttgtttcatgccttaatctctcttatttctctgagttccaaatacatgcatgttagaatactttacctttttcataggcagctaaataactatttttttaaatcagtcttttatgttgctgtacctcaggttgggtggtggtgttttttttgttttgttttgttttgttttgttttgtttttgcctgacctctagttgattgtcaaatcagctgttaaacctagccaatgaatttttcatgttataccctgtatttttcagttccacaagtatatttctttgtatgttgagattccacctcccccatatctgttcattaattatgttcaactttaattccttgaacatatttatgtagatgttttatagtccttgtttgataattgtaccatctggatcagccctgaatctctgttaattttttctcctggttatgggtcacatttcctgcatctcatttgtagtagttttattgtatactgaacattgtggatgctgtggtctttagactccagattttattgcattcctttaaagagttttgaggttagttctggcagacagttaacttactggtgactaaacctgatcattttataagttctgttcaggcttttttggcctagtctgcagtaaatcttaaattgtggcctttcttaggtctgtgttattttcccttcctgagctttgttttagatccctaagttatttcacatattttgactaattttgttttctattatttatttatgggttttcacagcagaaggggaagtctggtatcagattttcatggccagagtggaagtagtgttgctatttttcatagcttcccagtcgattctgatgtgcattcaaagttaataactattctaatgtagggtttcttgacagctgcactgttgacatttgggagctgagctgttatttgttgtgggggtgctgtcctgtgatgtaggatgtttcgcatcattcctagtacttatctactaggtgtcaatagtatctcctcctagctgtaacaacccaaaatgtctccagaaattgctaaatgtcctctgtggggcaggatcaacccaggctgagaaccaatgctctatcacagtagattattgcattgccttgagccctttgctactcaaagtggggtgtgcagaccagctgtattggcatcatctggagcttctcagaaatacagaatctcaggtcatactcctagaccttttgaatgagatctgcattttaacaagttatgatgatctgtttgctttctaatactcgaagaataatgccgtagagcaggggtcagcaaaccttttcttaaaaggccagaaagaaaatattttcagtttactttccatacagtttttgtcagaactattcaacaatgccattgtagtgcaaaagcccacatagacaatacataaacaaattgatgtggctctgttccaataaaactttattcacaaaacaggcaactagccaagccaaattttggcaactcctgttatagactatcctaatcagaccccctcagtgtactgaagacaacaggtggttaaattctttgatgagtgccttgccatatgatgtcatttgctgatgttcaagagagattaagtgtatagattacacagtagatgattctggaaattatagtagcttgacttctatccttacctaagtggagatatctcccagccttgcacatgtgagctatatgtaaatgctgctctatgatttgatagcataattattatttgtattatgctttataggcctactggaataattattcacttattttgactttagttaataaagctgacaaacttatgaaaaactgcattaatgtgacttcgttagctcagaaagagtagtttaaaatgagttatttaactctaaagtgagtcatttaactctcaagtaattttttttcataggaaagctagtagtttttaaaacatcctttgttttatgtaggactcctttctgacacttccaaaactctgtatctagaaaggggagggctgtttgtttgaagggtggcagtttaaaggttgagaaggtagtagctattctgagaatgatggacagtgaacaagcttaaagtattttgctttgttttataaatttcttctcttctaagttagttacttgataaatggtgctgagggggcatgccagatgtcaccaaagcaaagcagaaaaactcgactttcagccagttaagtggtgatcaggaaactgattcctgggactttggccaacaggaatgatgaaaacatagaagtagctcccgaaacttgcataagtaaccagttaatttgttttatattaataccacttaatttgctttatattaatatctattcggtctatactggttcgtctgtatagctttccaagagacataacactatagctacccctgaggcagttttctttggctgtgtacagcctcatcctttgcccactgtacagtggacacttctcagttgccatggaatcagaaggtaaagaaagaatcacattaatgaccaaaatatttctaattatggctatcttacccccttaagattaagcccaattttttggttttgccaagaaaattcagttttcatattctatcctatttatttttagattataaattacttaagagatggcctactgacgtggtttaaaagaaccactcaaattatatccagatttgcttgttggatgtttataaactcttaaaaagtgtaaatctttaagatctttacctaaaaattacttctcaggaaaaataacacgcaaaaacttgatcttgtataacattttatttagcattcttacacactacacaaaataaatacttggataactcacgtctaacaaactaaactatatatgtattttttccataggaaagcacaaggagaagacagaaatatcaagagtctcaagaacctttgaatgaagtaaacagtttcccacaaaaaatcagctatacacaattcccaaactcattttatgagcctcatcaagattttaccagtccagatatattcaagaagtcaagatctccatcttggtataaatacacttccacagtcagcacggggatcacagacttagaaagttcaactggactttggcctacaatttcccagtttactcttagtgaagagacaaacgcagatgtttattattatcgcatcatcatacctgtccttttgatgttagtatttcttgctttattttttctctgaagatgataccaaaattccttttgataattttttaagtttccagctcttcaccgaaatgttgtattcttatttcagtgtttccttccagacatttttaaggtaattggctttaaaaagagaacatattttaacaaagtttgtggacactctaaaaaataaaattgctttgtactagaaatagtgtcatagaatagtgtcatagtacagtttggaaaacacttctgaagtttcagatcacctaggaaatctagaaaaggagtttaatgtttttgatcagagaatttgaaaaatagaaatacagagaatgagtttcaaaagttttagataaactgatatactatatagatctatcttctagaacatattactgaaagctaggcacattttatgagatgtgattaacaatttgcttaccttactacaatatggacattcaccaaatatgatgttaaaactctgtctactagttagtagtcctctcagccactgcaaattttaaaagataaaggagaagcgtcagcatgattacaaattacagatactccaaatgtcattccctttgtttttaagtgcattatgtttttattccagaagacttagcttaattttgttttgcaagagtaagggatgtatttcctgagccaatagcagactattaagatgttgagtaacaagggaaatcaacatggaattgaaggcctaaaccactggtttataaccagattatgggcccctttaagaatctgataagaattacgcattttctttatccccagaatagacatacataaaaataatgcatactaagttcctggcattcatagactttccctaaatccattaatcacaaattaacaactcctgctgttaaagatactacaggctcttgaaaatttccctcttagttctggtctgaatcactaacagtgggttaattttcaacccattgattataagcatgagccagtgaatttttaaaaattaaatgaatattcataattacaaaagaaatcacatgttcccttagagtatttctgtaatttgacctgtatttctgtaatttcatgattttatataaggtaaatagatgcctctgcctaagttctccattggcaaagtacagacggcaccaactgctacctctaatcacaaaagtaaagatgtgatattaaggaagactgaaaccgaaggcaacatacaattgcaaggtgttctgtatatagttacacacagtttatcatgtatcaactaggccctaaggtgaagccaggcactaaagacaggaatgaaagtagacttcacatacagtaagtaaagtggcattgcctgagtgctgtgagactcagatcacaaaaggcattcttctcaacatgaaaagtagtagtattggatatattctattcttaaatgcagcctgaaaagtaatagatactacatagtactaatttcattttcactgtattactgccactttcaaccacctccacctcgggtaaacctatgaagcttacattgtggtaacaaggaatttatagaaagattccaatgtaccatcaatttaatttgttatgtgtcaataagctagtccatgaatatattctggatagattttctcccttggatacttcagaacatttctccactcattagtaactgtgatgaagaaatgaagcacataagcatctggaataaactggtaaaaggagttaatggcaaaagagaggatc

SEQ ID NO: 667 - DNA, 25076 bp, Homo sapiens
  source 1..25076: mol_type = genomic DNA
tgggaggcatgaactttgtgtatcttccttcccctgggtgaccagtccaactccgtccgaccttcctctgtctgagatagctctgttcaacccagaggactcagcagctgctgagagtctgtgccaagcaggtgcccttggctgcagggcggggtgggcccagggcactgaccctctgaccagctgctccatcaaccctctggcactctgacagctcctagcccaatctgacagccaggatgacaggccaaaggagttggaggctggaaccagggccggagggaggtgggggtgacagcctcgccggaggccatggggaggggccaagagttggccgagaggtggggagagaggcagcccagtgatgactaacccaggcgccccacccagccagccggcttcccaggcagtcagggccaggcctgggctaggggcctcacaatcggacaggctggggggaggtgcagaggtgaccttctctcggcccaagacggccagttagtctggggagcgggggttagagtttccaggccctcctcttgccctcttccccccgcccaaccacggtgaaaccctaacctttgggttgcataaggccccggcaccgccgccccctactcctctcccctccccccttacataacatcccctggagagaacgagaggaggggccggcccgcccagcgaccccttccctgccagggcgctgaactggccctgacccagtgaacgccggcagaggcaaagcacctcctcgccgcccgctcggggggtccagaccctccccaggctagatggccggcccctgtatcctcagaccgggggccgccgggtgagccgcccccggccctccggcccctcggctctccccccgccccccgccactccgccagcccttccgccacgactcccgtcccagactctttcctcgtagctcctgacacactaacccggccagtccaggcccctctccccgaggcgcccctgcccccgccgccccttctcctcccggaagggctgggtgtggccgcccggaccccactttcaccctccatcccgttaccgcggctccccgctgcgtgaccgggtcgccagctcacacccacctggtgctgggtgtgggggttgctgcacgagggggagcaaatcactgcgtccgctccccacggccggcggcgctgtctcttctcggcacccagcacacaccggctccaggctccgatcagctggcggcgtcgtgacgcacgagctgcgaatgcacggcccggggccaatcaccgcccactgctgggcaacgtggccccgcccacccgggggccgacggggcctcgccctggtcccgcctctccgggcgccctggctctgattggcaaggaggccacccttttgccgggcggaattgcacgaagccacgcccacccactgaggagccggccaatagacggacaggtgtggcccagccctccgcgtcagcgacccgcttagaaaagcgctacgtcaaacgagagtcctaaagagcaggcgaaagccacggcgtctgcgtttgcaatgcatgctggtccgtgtagttctcagcctgacaccgtcgttcccagaacccagcgcgctctgtgagttggcatttttaaactgagctcggaatccagcccggggaagtccttaaagggcgacagcccctccttgttggagtcgtgagtgcttcttttagacattccccaaactgactcgccggcctctgcgggacgctatagctctttaaggaaaggtggagcggaccaaggagcaggagtgggcagagcgtcagcccccagggcagcagagactgccgttggagagctctccagggtttttggaggagggagggtgctcgcctcgcccagcccactcctcctgggggctcttcctaaccacaggaggctttttttcttggatgtctcttcccagtcccagaagagcccccagagcctcccaagaggtagctttctaacaaaagattcatagcacagtcctcaccttagggtagagggagggcttctggtcagaaattaggggatgggccatgccaaagtgcaaagggtcagcaatcgcatcctctgattaacccccattcagtcccgccctccaaagctcttcactgactcaggcctacttagggaagagattcgaaggtggagaccaatgagcaggctgctccttccccaggggccaatcagagtctagatgagcgggggatgggcaaaaagtgaaatgaacccagtgacttggcaaaagctgctggtcggcgtttttaaaggggcaagccggagacctgccctaccttatcaatccccgcaagtcccccaaagaggaacatgtggactgaaatccatgccttttccttcagctccaaataggggctgagggtaactaagcaggaatgatgaggctggagggtgagatccttccttctgttaaatacgcactccatcaggtaattgataaggttcacttggagctccaaaattctgagcctgcgttcaggacattgcgcctttaaggaaacttcctgccttgcgccccagtaacagctgattgttggaaagtgtgacctctggggacgaatcagctgttaccacatcctcctccttgcttaccctcctccatccccttatccactcccatgggtggtgaaggaaagaacgtgggggatgtgattgtatgatctttcttttcccccatcactccaagactgtctcccccaaccccaaccccgctctgctccttagttcttcagaggctctgggcttggaaagagaggtatttcctgttagcacagtaaattcagactctgtggtctagaccctccctggtctaggggaaggccagtactggggaggtccagaatggtggctggcgctggggagggtacagtgaacccgaggaccaagcctggggaggaggaatggctatgggaagcaaacttggggttcagaacgctgcttctcaggccagccgccccctacttcctactcaagttgccctattcctccatggacaggtgtctgctgatgggatcctcctgcttttgcccatttactccacctccttatttattttttttttttctgtttttgagacagagtctcgctctgttgcccaggctggagtgcagtggcgcgatctcggctcactgcaacctccacctcccgggttcaagcgattctcctccttcagcctcctgagtagctgggattacaggcgtgcgctaccactcccagctaatttttgtatttttagtagagatggtgttttgccatgtgggccaggctggtctcgaactcctcacctcaggtgatccacccgcctcggtctcccaaagtgctaggattataggcgtgtgagccaccgcgcccggccgcattcactccacttctaactgttctcagctgccacctggtccctgggccgctccatttttggcttttggcggtgccctgcccacatggccaccccccatagcaagggtcctaattgctcaaggactgcaggtgggacacgttggccccagaagccagcgtctttggctgggaagtgctgggaagacccaggtaaatattttgcctcgatcctgagttgggagtcagggtcactccaggacaagcttagtgtgaagtcctaggactgacttggcaaggcgtggagaaattgagcagggccctggccaagcatggaaggaagtgaagcctcaccagtggcccctattctccattatcctgagcatagaaatcccatccctttcccactcacggcccttggggtgacccttttccattttgttctgaacactgaccccaccccctaggtcaaaagcacaggcttcgagtccagggtttcgccacctcagcacccactggcattttaagtagaataatttcttgtgggagggctaccgggtgcacaataggacatccacgtggtccctggcctctgtcctagatgtcagtggcaacacccacccacccccagctcccagttttgacaaccaaaagtatctccagacgttaccaaatgtctcctaggggccaaaatctcctccaactgagaactactgtgttaggcacacttagattcaaattccagctcttactagctgtgaacttgttaccgataatttcccctcatctacaacatacggtgaataaggaattcaagccttgttgtagggatttcaacatttaaaaatattttaaaagttaaaaatgtgcccgggcgcggtggctcatgcctgtaatcccagcactttgggaggctgaggcaggcggatcacgaggtcaggagatggagaacatcctggctaacactgtgaaaccccgtctctaataaacatacaaacaattagccgggcgtggtggcgggcgcctgtagtgcccagctacttgggaggctgaggcaggagagtggcgtgaacccaggaggcggagctttgcagtgagccaagattgggccactgcactccagcctgggtgacagagcaagactccgtctcaaaaaaagaaaaaaaaaaaaaaattaaaaatgtggccaggcacagtggctcatacctgtaatcccagcactttgggaggccgaagcaggtggatcactttgagcccaagagttcaagaccagcctgggcaacgtggcaagaccctctttaaaaaaaaaaaaaattaaaaaatggcctggcgaggtggctcacacctgtaattgtagcactttgggaggctgaggcaggcagattgcttgagctcaggagttcgagaccagcctgggcaacatgatgaaactctagctctacccaaaatacaaaacattagccaggtgtggtggtatctgtggtcccagctactcaggaggccgaggcagaggttgcagtgagccaagatggcgccactgcactccagcctaggtgacagaatgtgactccatctcagaaaaaaacgaaaaacaaatttaattagaaaacacctagcatagatttaattagaaaacacctagcgtagatttaattagaaaacacctagcgtagatttaattagaaaacacctagcatagtacctgccacactggtccgcagctggtgcactacttttctccctgccggattagcaagagctgaccccgctcaacatgggctgactggtggggcagctgcagcctctgtccctgactatccaagacatgacctcccggaaacccaatactgaggctggccaaggggagcggctaatttggtctgagattccccagagcccaaaggtgcttgcattgggattcagggaacacgcttactgggggcagtgagagggaaattccggaagagagctgttacagacgttacttctcaagacatagcctgaaggttgctgcatcagaattacctcgcgtacttgttaaacatttagatagctgtatctcactccagactcctgaattagaattatgccctaaagggccgggcatggtggctcacgcctgtaattccagcactttgggaggcggaggcgggcggatcatctgaggtcaggaatttgagaccagcctggccaacatggtgaaaccccatctctactaaaaatacaaaagttagccaggcgcctgtaatcccaggtactcgggaggctgaggcaggagaattgcttgaacctgggcggtgaaggttgcagtgagccgagatcgtgccacagcactccagcctgggcgacagagtcagactccgtatcaagaaaaaaaaaaaaaaaagaattatgccctaaaatttgaaaactactgccctagggctcagattgggccagggtttgaggccccaggaatcccagtgcgccagttcccaatattgctaggacatctctattctcgggaggaaaggagaatttcaagaggtaaaattaggtacactcaaggtcactgctgcagtgtaaccccagtaccgctagagggcagggcacacacagacttgcagacagaaaaagtagtacctgctcaatctaggtaaactgagaccagcgcaaagaacaggtggacccagccagctctattggtactaagaagcaagcactaccttctaaccatcaaaacatatcctctgatttcaggtatttatatcaaagttggggctgggcactgtggctcacgactgtaatcccagctctactaaaaatataaaatttagctaggcgtggtagcaggcacctataatcccagctactcgggatgctgaggcaggagaatcacttgaacccgggaggcggaggttgtggtgagtcaagatggtgccattgcactccagcctgggcaacaagagcgaaactttgtctcgaaaaaaaaaattagctgggcttggtgacgctgcctgtagtctcaactactcgggaggctgaggtgggaggatcacctgagcctggggaggtcgaggctgcagtcagctgtgacaaatcactgcactgcagcctgggtgacagagtgagaccctgtgtcaaaaaaaataaataaaaaatcactcgggcaccatggctcacacctgtaatcccagcattttgagaggccgagatgggccgattgcttgagcccaggagttcaagaccagcctgggaaacatggcaaaacctggttactacaaaaatacaaaaaattagctggatgtggtggcacattcctgtagtcccagctactcaggaggctgaggtgggaagttcacctgagcctggaaggtcgaggctgcagggagccaagatcacactactgcattctagcctgggcaacagagtgagactctgtcttaaaaaaaaaaaaaaaaatcaggccgggcacggtggctcacacctgtaatcccagcactttggaaggccaaggcaggcagatcacctgaggtcgggagtttgagaccagcctgaccaacatggagaaaccctgtctctactaaaatacaaaaattagccgggcatggtggcacatgactgtaatcccagctactagggaggctgaggcaggagaatcgcttgaacccgggaggcggagattgcggtgagctgagatcgcgccattgcactccagcctgggcaacaagagcgaaactctgtcttaaaaaaaaaaatcttcttaaaaggggtggtgaggattacacaaaacagggtatgcaaaatgcttaacagatgactagctcctggtaatgctccatacaagtttgttgtaagttactactgcccaggatcatatgaccaagcacatgagaggctccagctacccttcaaggaagaggagacagatgaaatcagatcatggctgagacattcctgttttctctctctttttttttttttttttgagatggagtctcactctgttgcccaggctggagtgcagtggcgctatcttggctcactgcaacctctgcctcctgggttcaagcgattctcctgcctcagcctcccaagtagctggaattagaggcgtccgccaccacacctggctaatttttgtattttagtagagatggggtttctccatgttggtcaggctggtcttgaactcctgacctcaggtgatctgcccatctcagcctcccaaagtgctgggttacaggcatgagccaccgcacccggccctcctattttctctcctatcaggcctagttttcttttcttttctttctttctttttttttttttttgagacggagtctcactctgccacccaggctggagtgcagtggtgtgatctcagctcactgcaacctccgcctcccaggttcaagcgattctcctgcctcagcctcctgagtagctgggattacaggcacccgctgccacacccggctaatttttttgtgtttttagtagagatggagtttccccaagttggccgggctggtcttgaactcctgacctcatgatccgcccaccttggcctcccaaagtgctgggattacaggtgtgaaccaccgtgaccggccaaggcctagttttcctaagtgtctttatgggaccctcacacctgtacaccaaactccttcaagaggcaaactctctcctaagagggagacaaaagaaacagggccagtggtttcactgtagacaatggtctatctgtcctgcagatgagtcagaactaagaccccttgaggaatcatgttgctttggtgccggctgtctggtttctattccatatcctgtgccgcacccttcccccagccacagtgacatctggaggctctgaccacagctggcaggctctgtggtaccgcagaggccaatcttcaacaggaagtcttgggggaacatttcttcccccaaaacaccaggcctctgggcctgggccacttctctccctcagacagcccagggtttcgttttatttttattttattttatttatttatttttatttatttatttggttttatttttatttatttatttttatttatttatttatttatttatttatttatttatttattctttttgacggagtctcgctctgttgcccaggttggagtacagtggcgccatctcggctcactgcaagctctgcctcctgggttcatgccattctcctgcctcagcttcccaagtagctgggactacaggcgccccccaccacggccaggtaattttttgtgtttttagtagagacggggtttcaccgtgttagccaggatggtctcgatctcctgacctcgtgatccagctgcctcagcctcccaaagtgctgggattacaggcgtgagccactgcacccggccagttttgttttttaaaaagccgtgagagggctgtcaggaggcagtgctcctgggcagaaagaaggctggcaccagtttctaagtctccattccgccaggcggacaagcctctctggcggttgttggttatcacttgtaaaatataaacagtaataactgtcctccctacctcacagagtgtgttgcgagggccaaatggaatgtgactgttgaagtacttaggaaagttaaaaagctccttcctatggaaggtggcatggaggcgccggggggattccatgtcaaaagtcccagttctggccgggcgcggtggctcacgcctgtcatcccagcaccttgggaggccgagacgggtggatcacgaggccaggagttcgagatcagcctggccaacaaggcgaaaccccatctctactaaaaaatacaaaaattagccgggcgtggtggcgcgctcctgacgtcccagctactcgggaggccgaggcaagagaatcgcttgaacccgggaggcagaggttgcggtgagccgagatcgcgccactgcactccagcctgggcgacagagcaagactccgtctcaaaaatagacacaacagaagtcccagttctgcccctggttgtgcggtccgcacttaactaagaggctggcatctctgggaacagcctccgggacccgcgcgctggtgcgtgctggagggagtagggaggggtggggcggtaggcatcgccctccgccgggcccggctggagctggctggagaccctttcagccccgggaggaagcggagcccagaccgagccagagcggagcagcgggagggagggcggggaggccgccgggcaggaagcggggtcccgcccgggcctctggagccacgtgcgcttgtttccgtgctggggcgatcacgtgacccgcgtcagctgacccgtcacggtggagcccggtgctcgcgcccggcagcctctgccccgccgcgcccggagcgcaggacccgcggaggggtaagcgcgccccccgtccgcctcttcgccgccgccggcttcctgcggccgcctccgccccagcccctgtcccgcgcccatcccagccccgccggcctggcaccccggaagccgtcgccagcagggccgtggctgggctcagccccgcgctgcccccgggcggcctggaggagatggcccagggcagcggggggcgggaaggcgctctcagaaccccggccgggggctggcattccccgccaagcccagacatgcaggagctgctccggagcgtggagagggacctgagcatcgatcccaggcagctggctccggccccggggggcacccacgtggtggccctagtgcctgcgcgctggctggccagcctccgcgatcgccggctgcccctgggaccctgtccccgcgcagagggcctgggagaagcggaagtcaggactctcctgcagcgctctgtgcaaaggctgcctgccggctggacgcgcgtggaggtgcatgggctgcggaagcggagactgtcctaccctctgggcgggggcctgccctttgaggacgggtcctgcggccctgagaccctcactcgcttcatgcaggaggttgccgcccagaattatcgcaacctgtggcgccatgcataccacacttacggccagccgtacagtcacagccctgccccctcagctgtccctgccttggactcagtacggcaggctctgcagagggtctatggttgctccttcctgccagtgggtgaaactacccaatgcccttcatatgccagagaaggcccctgcccccctcggggcagccctgcttgccctagtcttttacgggctgaggccttgctggagtcgccggagatgctgtatgtggtacacccttacgtacagttctccctacatgacgtggtcaccttcagccctgccaagctgaccaacagccaggccaaggtgctgttcattctcttccgcgtgctgagggctatggacgcctgtcaccgccaggggctggcgtgtggggccctgtctttgtatcacatcgcagtggatgagaagctttgcagcgagctgcgactggacctgagtgcttatgagaggcccgaggaggacgagaatgaggaggcccctgtggcaagggatgaggcgggcattgtgtctcaagaggagcagggagggcaacctgggcaacccactggccaggaggaacttcggagcctcgtgctagattgggtccacggccgcatcagcaacttccactacctcatgcagctgaatcggttggcaggtcggcggcagggggaccccaactaccaccccgtgctgccctgggtggtggacttcactacgccccatgggcgcttccgagacctgcgcaagtccaagttccgcctcaacaagggggataagcaactggacttcacgtatgagatgacacggcaggcattcgtagcaggcggggcgggcggcggggaaccccctcatgttccccaccacatctcagacgtgctctccgacatcacgtactatgtgtacaaggctcggcgcacgcctcggtcggtgctctgcggacacgtccgcgcgcagtgggagccccatgagtatccggccagcatggagcggatgcagaactggaccccggatgagtgcattccggagttctacaccgatccctctatcttccgctccatccaccccgacatgcctgacctggatgtgccagcctggtgcagctccagccaggagttcgtagctgcccaccgagccctgctggagagccgcgaggtatcccgggacctgcaccattggatcgacctcacgtttggctataaactccagggtaaggaggctgtcaaggaaaagaatgtgtgtctgcacctggtggacgcccacactcacctggccagctacggggtggtgcagctcttcgatcagccacacccccagcgcctggctggggctcctgcccttgcccccgagcctcccctcatccccaagctgttggtccagaccatccaggagaccacaggccgggaggacttcacggaaaacccgggacagcttccaaatggagtgggccggccagttttagaggccactccctgtgaggctagctggaccagagacaggccggtggcaggagaagacgacttggaacaggccacagaagctctggattccatttcccttgctgggaaagcaggtgaccagctgggctcctccagtcaagcgtcccctggacttctctctttctcagtggcctcagcctcccgtccaggccgcaggaataaagctgctggggcagaccctggggagggtgaggaggggaggattcttcttcccgagggcttcaatcccatgcaggccctggaggagctggagaaaacgggcaacttcttggccaaaggcctagggggcctgttggaggtgcctgagcagccccgggtccagccggctgtgccactgcagtgcctactccacagggacatgcaggcgctgggtgtcctattggcagagatggtgtttgccaccagggtgcggacgctgcagcccgatgcacctttgtgggtacgcttccaggctgtccgagggctctgcacgcgccaccccaaggaggtccctgtgtctttgcagcccgtgctggacacactcctgcagatgagtggccccgaagtccccatgggagcagagaggggcaagctggaccaactgtttgagtacaggcctgtctcccagggcctgcccccaccctgcccaagccagcttctcagccccttcagctccgtggttcccttcccaccctacttcccggcactgcacagattcatcctcctgtaccaggcaaggcgtgtggaggacgaggcccaggggcgcgagctggtgtttgctctgtggcagcagctgggcgcggtgctgaaggacatcacccctgagggcctggagatcctgctgcccttcgtgctctcactcatgtccgaggagcacacagctgtgtacacggcctggtatctgtttgagcctgttgccaaggcactgggccccaaaaatgccaataagtacctcctgaagccgctcattggtgcctacgagagcccctgccagctacacggccgcttctacctgtacacggactgctttgtggcccagctgatggtgcggctgggcctgcaggcatttctcactcacctgctgccccatgtcctgcaggtgctggcgggcgcagaggcctcccaggaggagagcaaggacctggcaggggctgctgaggaggaggagagcgggctgcccggggccgggcctggctcctgtgcttttggggaggagattcccatggatggggagcctcctgcctcctcgggcctggggctcccagactacacgtctggcgtcagcttccacgaccaggctgacctccctgagacagaggacttccaagccgggctctatgtgactgagtctccccagccccaggaggctgaggctgtgagcctgggccggctgagtgacaagagcagcaccagcgagacctccctgggtgaggagcgggctccagacgaggggggtgcccccgtggacaagagcagccttcgatcaggtgacagcagccaggacttgaagcaaagcgagggctccgaggaggaagaggaggaggaggacagctgcgtggtgctagaggaggaggagggggagcaggaggaggtcaccggggcatctgagctcactctgtctgacacggtgctgtccatggagacggttgtggccggcggcagtgggggagatggagaagaagaggaggaggcactgcctgagcagtcagaaggcaaagaacagaagatcctccttggtaagttcccaggtctgggaggtgttggtcaaaaacacctcctgctggccgagcacagtggttcacgcctgtattcccagcactttgggaggctgaggcgggcggatcacaaggtcaggagatcgagaccatcctaataacaaggtgaaaccccgtctctactaaaaatacaaaaaaatagccgggcgtgggggcaggcacctgtagtcccagctactcggaaggctgaggcaggagaatggcgtgaacccgggaggcggagcttgcagtgagccgagatcgcaccactgcactccagcctgggcgacagagcgagactccatctcaaaaaaacaaaacaaaacaaaaaaacagctcctgcttctccctgcacactggcagagcacctactctgtgccaagcagtggatcgagccaggaccaccggcaacacaaatgtaggcctgccttcacagagctcacacccagcagacgagatgccgcagtgcagacagtcttaagcaagtgtattatgttagtgcgataaagaacatggctgcattcctaggagggagtgcaacatggagcttttcggccgggcgccgtggctcacgcctctaatcccagcactttgggaggccgaggcaggaggatcacttgaggttaggagttcgagaccagcctggccaacatggtgaaaccccatctctactaaaaatacaaaaattagccaggcgtggtggcgggcacctgtaatcccagctattcaggaggctgaggcaggagaattacttgaacccaggaggtggaggttgcagtgagctgagatcacaccactgcactgcagcttgggcaacagagcgggactccgtctcaaaaaagaaaaaaaaaatggtgcttttacatctagttttcaagggtcagagcaggcttccttaaaaggagagacagttgaggttcaaggaggagtaggaagaaggtagacaaaaatgggcaaaaagaaagtctgaaggctgagggaacagcatgtgtgaggctctgaggctgtcatgttccattaaagaagagaagcgggggaccgggcgcggtgcttcacgcctgtaatcccagcactttgggaggctgaggcggatggatcacaaggtcaggagattgagaccatcctggccaatatggtgaaaccccatctctactaaaaatacaaaaacttagctgggcatggtggagggtgcctgtaatctcagctatttggaaggctgaggcaggagaatcgcttgaacccggaggttcaaggaggagagtcagggcggtggaaggtggaggttgcaatgaactgagattgtgccattgcactccagcctgggcaacagtgcgagactctgtctcaaaaaaaaaaaaaaagaagaagaagaagaagagaagcagggaaaggccgttatggcgagaccgagggagtggagggaagagaggccagagggaaggtggccagggccgggccaggccttgttaaggagtttcagaagacccacgggcaggctaacttcctgcgggtcgtgcctgtggagaggaacctgcggcagccagagtcccacaggccagggcctgggcacctctgccgctgttacgtggagggggtggtgtgggacagccggcccgggctgggctcttggcagagctgcagccgcaggtggttgagtggggtgccgtggggtggggtgggaggggtgatgagcccctgttatctgaggagctcagggcctgctcccaccccgcagatacagcctgcaagatggtccgctggctgtctgccaagctcggccccacagtggcctctcgccacgtggcccggaacctgctccgcctgctgacgtcttgttatgttggtaaggaggcctgcggtcagtgctggagatgaggctttctcccaggccctctgcctagcttcagcgctctccggcggggatccttcccacccctccctcaaaccaccccccggccaggtgctgggtcccagtctaagtgccagccttgggtagggccaggctgggcccccagctagagtgagctcaagcggccagcacagccctgcagggccaggctacccccggccctccactggcgactcagggctgctggcccttccgtggcaggacccactcggcagcagttcacagtgagcagtggcgagagcccaccgctgagcgccggcaacatctaccagaagaggccggtcctgggcgacatcgtgtcagggcctgtgctcagctgcctcctccacatcgcccgcctgtatggggagcctgtcctcacctaccagtacctgccctacatcagctacctggtcagtcgctggtttggcaggcccggggctgggaaggctgaggacctgagggccggcccgggctctcttggtgccagggggtctgtggggctgcccggccctcatctgctcggtggctctaggtggccccagggagtgcctcaggccccagccgactgaacagccgtaaggaggcggggctgctggccgcggtgacgctgactcagaagatcatcgtgtacctctcagacaccacactcatggacatcctgccccggatcagccatgaggtcctgctgcccgtgctcagcttcctcacctccctcgtcacggggtaggcctctgccccagctgatgtagggggaccggcccagcggaggggctgcccaggagggggtgggaagctcaggggagaggacgtaacactggactgggtgtcaagagtcctggttttgatcccggctgtgtgaccctgagcaaaccacacccttttcctgtgcctcagtttcctcatctggtttggaccagttggtcttggagctctttcatttaaagcttttgatatgtccgggcacggtggctcatgcctgtaatcccagcactttgagaggctgaggcgggaagattgcttgagcccaggagttcaagaccagcctgggcaacaaaatgagaccccctctctaaaaatatatataaaggccgagcgtggtgtctcacccctgtaatcccagcactttggggggccaaggcgggtggatcacgaggtcaggagtttgagacccacctggccaacatggtgaaaccccgtctccactaaaaatacaaaatcttcgctgggcatggcagcaggtgcctgcaatcccaggttctcgggaggctgcaatcccaggttctcaggaggctgaggcgggagaattgcttgaacccaggaagcggaggttgcagtgagctgagatcacgccattgtactgcagcctaggcgacagagcaagactctgtctcaaaaaaaaaaaaaagtatatatatatgctgggtgctgtggctcatgcctgtaatcccagcactttgggaggccaaggtgggtggatcgcttgaggtcaggagttcgagaccagcctggccaatatggcaaaaccctgtctctactaaaaatacaaaaaaaattagccgggtatggtggctcatgcctgtagtcccagctactcgggagactgaggcaggagaatcgcttgaacccgggaggcagaggttgcagtgagccgagatcgcaccactgcactccagcctggatgacagagcaagactccatctcaataaaaataaaaataaataaagattttgctagattctggtcaagtcctgcagaacggcgggctggagctcatgagctctgtttccaggttcccaagtggggcccaggctcggaccatcctgtgtgtgaaaaccatcagcctcatcgccctcatctgcctgcgcattggacaggagatggtccagcagcacctgagcgagcccgtggccacctttttccaggtcttctctcagctgcatgagcttcggcaacaggtgggcagatctgctgggccagggcgggctggggcgggggctgtggacctgggtgaccccctgggcatcttgctcataggatctgaagctggactccgcgggccgtggcgaggaccagggtgggccagggtgggagctgtggacccggctgaccccctgggtgtcttgctcataggatctgaagctggaccctgcgggccgtggtgagggccagctgccacaggtggtcttctctgatgggcagcagcggcccgtggaccccgccctgctggacgagctgcagaaggtgttcaccctggagatggcatacacaatctacgtgcccttctcctgcctgttgggtactgccccatcacgttccccatcacagtcttcgtggctgtctcctcccttgggaggccccattctctgcccttgccccagagtcagcagtgggttctaagagccagcaggatgggtgagagcaaagggatttggcctcagacccctacccccaaggtgacacacaaacaaggactgagcagtagccagcaagagaggcccagaagctggcctgtagtgtccctggggaaggcaggagagtcagggaggtggactggcggtccgcaggagctggcgagagggaaggagtggcctcctgtttacgaagcttcccctctgggccctgcacggtgctgtgctgatcgtttcagcgtgtcatctccctggagaggacagacagccttgtggttacacctgttatcatcctgccactgaaatctaagcttgggaggccagggcaccacctgtcttgttccatattctattcctagtgcccagcacggcacggcacatatagaagatgctcatgtgtacatcacaacggaatgaatccacatttcactgaggaggaaactgaggctcagagacagagttacttgcccagagttgcagagccagttcctgccccatcttctgtggctcccgagtccttggatgggtgatagcagccgcctgccatcttccctgtctcaggacctctcccactcctatccaggtgacatcatccggaaaatcatccccaaccacgagctggttggggagctggcggcgctgtacttggagagcatcagccccagcagtcgcaaccctgccagcgtggagcccaccatgcccggcaccgggcccgagtgggacccccatggtgggggctgccctcaggatgacggccactcagggacctttgggagcgtcctggtggggaaccgcattcagatccccaatgactctcggcctgagaaccccggaccactgggccccatctcgggggtgggtggcgggggcctgggcagcgggagcgacgacaacgccctgaagcaggagctgccgcggagcgtgcacgggctgagcggaaactggctggcgtactggcagtacgagatcggcgtgagccagcaggatgcccactttcacttccaccagatccgcctgcagagcttcccgggccactcgggggccgtcaagtgcgtggcacccctaagcagcgaggacttcttcctgagcggcagcaaggatcgtaccgtgcgcctctggccgctgtacaactacggcgacgggaccagcgagacggccccacgcctcgtctacacccagcaccgcaagagcgtcttcttcgtgggccagcttgaggccccgcagcacgtggtgagctgtgacggggctgtgcacgtctgggaccccttcacaggtgagcgggcccaggtgaggcctgttctcttcctgctcctgcgccccaccaggcctccaggaagggggcccgagggtggggctgtaatgctgcggagtttggggagacccagcgaggccgcctaggagaacagttagggcttcgaatctgttagacttgagtctgaattggctccaccggcttacttgctgagtgaccttgagcaagttcctgctgctggaagcgtctcctttcccatctataaactgagaatcagaaaaactggcgtagaagataacacacagccgggcgcagtggctcacgcctgtaatcccagcactttgggaggctgaggcgggtggatcacgaggtcaggagatcgagatcatcctggctaacatggtgaaaccccgtctctactaaaaatacaaaaattagccgggcgtggtggcgggtgcctgtactcccaactacacaggaggctgaggcaggagaatctctcaaactcaggtggcagaggttgccgtgagccgagatcgcaccactgcactccagcccgggcaacagagcgagactctgtctcaaaaaaaaaaaaaagaagaagataacacatgtagggttttggcttcatgtgtagcagatatttggtcaatggttgcttattttttggcgtcaccatagggagaaatatggttaaaagggggaaagggatggtgtcggggaagacagagggaggtggcattgggtcagcagcactgtgcagagagaggaggttgctttggggatgggagcctggccgggccatggaagcaggaaggtgggagagtcaagaaacatctttaggccgatgcagtggctcacgcctgtaatctcagcactctgggaggccaggagttggagaccagactggctgacatggtgaaaccccatctctactaagaatacaaaaaaaggccggacgcggtggctcacgcctgtaatcccagcactttgggaggccaaagtgggtggatcatgaggtcaggagatcgagaccatccaggctaacatggtaaaaccccgtctctaccaaaaatacaaaaaattagccaggcgtggtggcggacgcctgtagtcccagctattcgggaggctgaggcaagagaattgcttgaacctgggaggtggaggttgcagtgagccgagattgcaccactgcactccagcctgggcgacaaagcgagactccatctcaaaaaaagagaaacatctttagcattttctaaggatccctgggggacgggaggcaggtgtgcggtgagttgggggattagaagctcccagggctcttccgtcagctgctgggaccccagatccactgtgactttccttcccagggaagacccttcgcacagtggagccgctggacagccgggtgcccctgactgcggtggctgtcatgcccgccccccacaccagcatcaccatggccagctctgactctaccctgcgctttgtggactgcaggaagcctggtctgcaggtcaggggggtccagttccctgagcactcgcctggttctctggggacctggcaaggaggagagactccccaaaaacagaaagccaggatgttgttctggggccctagttagtttctctttggtgctagatcacccacagccacacatcctgcggggcaggactctggcctgtgatgggggtggggttctgggcttttcatgccccctgatgagggtcagaggctcaggccttcctgctgtgtgggcttgggtggtgggcagggccttggggagtgtgagatgggaaggtggtgcctcagctcagccgccctctccctgcagcacgagttccgactgggcggtgggctgaaccctgggcttgtccgtgccctggccatcagccccagtggccgtagtgtcgtggccggcttctcctcaggcttcatggtgctcctggacacccgcacaggcctggttctgcgaggctggccagcccacgagggggacattctgcagatcaaggtgacgggccgggtctccctccccttgctgcccaacccccgcccctgtccagccatcacccctgcttagggtctgcctgcccgggttcaggctcgaactggtctgtcttatatacctggtccaggactaactgggcagggagggtagccctctcggtccaccttgggagccagttgcactgcaggggtctcagcaggaggcaggccatgggggcgggagccacggggcagtggggcgggagctatggggcagggctgaccctgttgctcatggcgatgttctaatgagtaacccttgtccatatttgtcttgcttggaggatcaggggtcaggccctgtccgtgacctagttcaggttaaataaagctgagctgggaggctgtttactgcctgtagaccgctgagcagagtccatggccctgccgggctgccctggctgggggcaggagcacgcctgggcatggggatcctgtccccgtctccttcccctccccctccctccattctcagtcacaggcctcggggagctgctcagggaggcccaggaggggaggaacagggcttcgtgtgggaggatttctgcaggcagctgggactttcctccccagcttggctggaggccaggagtcttgcattgccctgctgacagcaggctgtcgctggctccctccagagccccagggaaccctcagctcaaggtgcccccaaattctaactttccaagaaagtgtcaggagggctctggggtcagcctgggtgttaatcccagctctgctgcttgctggccccatgaccttggtatggttacttcacttctctgagcctcacttttcctgtttgtgaaatggggacaatggcagcatccaccgcatagggttgttacgaaggtcaaggtcgtcacgtgcacgcctggcaccatgcctgtgcgtagttctcaagttagagtgacgactgggttacggatgctgagcgtattaaaatgaaccaacgtgaatatggtgtgtgtgggagggtggcggcttgtcacccacccaggacggcctgtctccctggagagaaactgcggagggaactgggaaggccttggggcccaagggtatgcagaaggacccaggctcctgctgaggctctcctctcccgggacaggcggtggagggcagcgtcctggtcagctcctcctctgaccattccttgaccgtctggaaggagctggagcagaagcccacccatcactacaagtcagcatccgaccccatccacacctttgacctgtacggcagcgaggtggtcactggcaccgtgtccaacaagattggcgtctgctccctgcttgagccaccctcgcaggccaccacgaagctcagctctgagaacttccgcggcacgctcaccagcctggccttgctgcccactaaacgccacctcctgctgggctcagacaacggggttatccgcctcctggcatagactgaggcaggagctggccgggcaagggtgggaagacatctgcgggcgcgtgtccactcaccctgttccctgagcagcagctccctccagggaggccctgggtcccacgccctgggtgcccacatggcctgccaactagggcctgcaaatggagtgggggagtcctggcccctgaatcaccagagccaccaagcctgccagaggggtctcattcatggcttggggacacagggctcctagcaagcaggaagttaagagcaggaggaagcgttgctaccttcacttctccccagctctgccctctgggtccacatgaggacagggaagctcgggaaggggaagggagactggccctgcccagccggtctctagcccctcagcccccgctgggcactctctgtcccatccctctaggacagggaagctggcctggtccagggcactgatggtgcttggattccagcctaaggaaggctggccgtggtccaggagttaagggcttgggtctggggtttaagtggccacccatccaggccctggccagtgtgggaccgggacgggaaggaagaaggaggctaggagcagggggaaaaggtgcacttggccagtggcgcctgccaggagtgagtccatgcgttgtctgcccacccctaccacagtgtttgtgccttcagctgagggggcagcctctgggccctgaacccctgctggggctccacgaccctgagagaaggggtgagaagaatcatctctgcacctcgggtctctgccagaggaagacttaagcatccctgcgacctcacattctagacagagatgaggtccaggggttggcccctgctgccttctcacaatttgcaatagatgtaaataggaccaataaatcctttggaagagccatggggtgaactgaggcttgtcttttttttttttttcaatagagatggagtctgactatgttgcccaagctggtctccaactcctgggctcaagcgatcctcctgcctcggcctcccaaagtgttgggattacaggcatgagccaccacgcccagcctgaggcttatcttgctggtggtgtcagggtggggaaagtcgagacccagcagtttccaggacagtgagggtgggaaggggcctgatggagggagtgaggagcaggacagtgagggtaggaggcggcctgatgcagggagtgaggcgcaggacagtgagggtgggaaggagcctgatgcagggagtgaggcgcaggacagtgagggtgggaaggagcctgatgcagggagtgaggcgcaggacagtgagggtgggaaggagcctgatgcagggagtgaggcgcaggacagtgagggtgggaaggagcctgatgcagggagtgaggcgcaggacagtgagggtgggaaggagcctgatgcagggagtgaggcgcaggacagtgagggtgggaaggagcctgatgcagggagtgaggcgcaggacagtgagggtgggaaggagcctgatgcagggagtgaggagccggacagtgagggtgggaggcggcctgatgcagggagtgaggcgcaggacagtgagggtgggaaggagcctgatgcagggagtgaggcgcaggacagtgagggtgggaaggagcctgatgcagggagtgaggagcaggacagtgagggtgggaaggagcctgatgcagggagtgaggagccggacagtgagggtgggaaggagcctgatgcagggagtgaggagcaggacagtgagggtgggaagtggcctgatgcagggagtgaggagcaggtgtgagggcgggaagcggcctgatgcagggagtgaggcgcaggacagtgagggtgggaaggagcctgatgcagggagtgaggcgcaggacagtgagggtgggaaggagcctgatgcagggagtgaggcgcaggacagtgagggtgggaaggagcctgatgcagggagtgaggagcaggacagtgagggtgggaagtggcctgatgcagggagtgaggcgcaggacagtgagggtgggaggcggcctgatgcagggagtgaggcgcaggacagtgagggtgggaaggagcctgatgcagggagtgaggcgcaggacagtgagggtgggaaggggcctgatgcagggagtgaggcgcaggacagtgagggtgggaaggagcctgatgcagggagtgaggagccggacagtgagggtgggaaggagcctgatgcagggagtgaggagcaggacagtgagggtgggaggtggcctgatgcagggagtgaggagccggacagtgagggtgggaaggagcctgatgcagggagtgaggcgcaggacagtgagggtgggaggcggcctgatgcagggagtgaggcgcaggacagtgagggtgggaaggagcctgatgcagggagtgagga

SEQ ID NO: 668 - DNA, 10698 bp, Homo sapiens
  source 1..10698: mol_type = genomic DNA
tttcctctcccgcgctagggagctccctcctggggctgccgtggggtcagcagcaacgtgcaggtgaaaacactgtgtgggctccaggccgatcagatgttatttattattctgagctgtgttttggtgggagacttggaagggctggagggagagtcagagtgctttgggctcctctctttcccgatgctgctttgagagttctcagagtagaacgtccaggaatggggcccgggaaggagaagtccgtggcttgagacaggaccaggttgggtgtgggggctttctccatcagccccaggagtgggggtaggatggccaagcttcccctgccctgccgtgtgcccctctcctgccctcctcagcaccccccaacctctgctcggtgcctcccctcctccgaccccctctcatctctcccacaccctctaatggtctcttgggactgcccagaaatcggcctcctctccttggatacttgtcctggcctaatggggctgtgacagtttttctaagtcctgcttataaatgtgtcactgtccatgtccctttgtgctatcaaaggaggctgcgcaaaccgcgtttgtccaagggctgtgtgaaggcccccgcgcggagcagctggaacacgggctgatgaaattacggggaattcaaagcagccggcgtcgcccgctgtctggcttcattacggggactggcctcgaagggaagtttattccaataatttagaggattaggatctgacacccttcattagcgatttgacataagcagaaaagacagatcctgcagaatggccgcacaacgggaagggaccagctcaggcggggagaaggcagcacccgcccggctgggaaggggaagggtctgggtgtggaagcgagggtcccgtggccgttttacagtcctgtgagatggcgagctgtgttcttgaaggggaaagtggacgtggggaaggagcggcctgggctcaggcctcagtttccttagctgtaaagcgagattaccttcaggatcccttccgtatctgatgcgtgtgggggccactccacctactgtccccgggacacagcagctcctcaaggcccttgtggtttggccttggaaaggtacctctctttcggggctctatgtgcctccgccccctacccccaggatcgagtgaccaactcgaaaacactcagactgcaggctgctctgtggcattttagatagaagccatttgctgccaaatgggggaggaatcgcccccagcccctggcagcttctggctctcttcccggcccctccacaaatatagcccctgatgtttcaaaaatttcttgtccagtctgtgaaaaccagagtttgggctgtgccttgacagcagttctggcagatggatgggggaggggtgattttaaaaggcccctgcccacacccagcaagctggtgtccctgtttcctgtaccgtggtggggtagctgtgcgacatgggcaggttgcttagcctctctgtgcgtcctttcctccgatctgaaatggaggtgcagtttgttgtgaggattaaatgagatgatgcgttcagagaagccacacgtgtgaagagcccagtgcatctggcagctggtaccaccaggactgctcactctgtgcgaccttggacaagtcgctcgccctcttcgaccacagaccttctcctttgggaagtgggggaggccagacaaggctggcagtcagaaggagctcactgaagagcagccactgtggtcgtcagcgagggcagctggactccggcacaatcctgagacactgtgaccgcggaggttttctcggtgtgtcgatggaagagggaggaatgtgatccgtcccagccgccggcggggccagagcatatctggtatgtgtctctggaatgatttggggaaaattaactgaagttggaacttaagacgcaaactgccctggacacagagatacagagctgtccgtgcgcacaccccccacaaagggccggggccggggtgggagtcggcttacagggcacagcgcggcgcaggcccgccctggaatggccgtgaacttgttgtttttccacgtcatttgctctcaaatgtactatcaagccgggcgatgctaacccggtggctgcaggtccctcctcgtaacaagcgattgtgtgttctttagaggtggccaaaggggaggagggggcccggccccaaggaggtgggggaaagggaaacaagccctccttcagagtgagcttgcgtgtcctggagccagctccccgcaaagcacatgccatttctggcccttgaaggggttaaaggcctcctggagtcaaaaacaagcaggtgtcccaccgtgccagatacgctgcctaaactgcttccagcttctttttttttttttccccccttctgcaataagtctgtgatcagccacgggacagaggcgccagcagcctgcctgtgacaggcatcaggttagctggctcccactcgggtggcgcgcccaggatataaatccgggcgcgggcccctgctgtggctcctctccctgcacactcaggagagggagcttccttctaaagacctttcttttatctgaagccgcacagcccggcaggctgtgctgacttggtggaggcagcagcggcagagcagcctgagcagcagcctgagcaggaaacctgctggggtggggagggcaggtgtctgcagcccctgagaagaaggccctggtgggccccagaccctggcatcgtttcaggggaggtctctagccgccccagcctgcaccatgtgggccccaaggtgtcgccggttctggtctcgctgggagcaggtggcagcgctgctgctgctgctgctactgctcggggtgcccccgcgaagcctggcgctgccgcccatccgctattcccacgccggcatctgccccaacgacatgaatcccaacctctgggtggacgcacagagcacctgcaggcgggagtgtgagacggaccaggtgagtggggtccagagaccagagatggaccacgtgagcctgtgagtgacgggggtgggagccgtcggggagggactgtgtgggagtgtgaggaggacaacgtgagtggggtccagaagccacagtgtgaggcggaccaggtgagtggtgtccggaagcaggagtgtgagatggaccaggtgagtgggatccagaagccacagtgtgaggcagaccaggtgaatggggtccagaagccgcaatgtgagatggaccaggtgagtggtatctagaagtgggagtgtgaggttgaccaggtgagtggggtccagaagccggtgtgtgaggcggaccaggtgagtggggtccagaagccacagtgtgagatggaccaggtgagtgggatccagaagctggagtgtgaggcggaccaggtgagtgggatctagaagtgggagtatgaggtggaccaggtgagtggggtccagaagccacagtgtgagatggaccaggtgagtgggatccagaagctggagtgtgaggcggaccaggtgagtgggatctagaagtgggagtatgaggtggaccaggtgagtggggtccagaagccacagtgtgagatggaccaggtgagtgggatccagaagctggagtgtgaggcggaccaggtgagtggggtccagaagccagagatggaccatatgagcctgtgagtgatgggggtgggagccacagggtggggaccatgcaggagtgccctgcaggtcctaggaaggtgaaggaacacaggccccgttcacctggagagaaacagggcaccatcctgtctattaacaccgaagcctggaaggagaggtgggagcgatgtcccagttcatcagggactggagcccgaggattcctccttcatgcgtgctgagggctactgtggccagcaccgtgccgggcacgtcgtgtatgttggcatgacatgtcagcatggtgggcatcagcagcccattcacaggtgagagagtggacacagagccaggcacggagggcacagttgtcatggccagtgagggaacgatgagcttggaactcatgtctaacaagaaagctttgattgcattggactccaggccacctcctcaggagtttggaccctgagcctgagagaagaccaggctgacggcaggccaagcaggagcagctctgaatggatctctggtgtccctgggaggaaggagaccacgtttcagcctcccagcgtccttggtcctgccttctgctctgtatcagagggcactgctgcagggcagggccagttctcttctagctcccgagtcattcccgagggccattcctgcccaccccctctggggcaacaggctgtgggacctacacctgctccaggcagagctatttcctgcccagtctggccagctctgagggcagcacggagtctcccaaggctccagatccaggctggggcatccccagggaacacgagagacactggttcccccatagatgcctggttacccacaggagagcagagggctgacctggagagggtggcctcaacctcacagtgcccagggacaattcttaggcctcccaggacagatgctccccttgggcaatggtggtgccaagtgaaaggaagataagaagtcaggaggagtggtggctgctcccatctggccaaggtcatgccattagttggctacatttgcaggcacaggctggcctgattaaccaggtagggcttggggatggtgagactctggtggattttgtgtgtcttggagagaaggcacctgtggaaggctgggtatccagacagcccttggggacattctggcccccttacacagaagtgttctaaggaccccctgtaggttccctgtggccagaagtaccttccctctggtgcccaaggacccaggctttcatggacctccaggtcctgaatgtcttagggaatgggatgaggctcaggccaaggagaaggttctcctgctcctactccctctcctgctctccattccctgcggggtctctctcccttagacccagctctgagagctgcccatccctgtcccaaagcctcccctggtgtggcctagaagactatgccaaacaagggctgcaaaacaaagtccccattctgagccgaaacgggtagaacagtaaacaagtcaagcaggcaggctccatgcagccagggtggggggatattttccccctcttagctgatgtggaatgtcaaagaggctgaaataaaagttggaatgacaagaggccagccctagtggggagtaattcacagagttactacctggtggaggattaggagcgttgcctgcctgccaagtgggtacgatgtgttattgtcgaaaacaccacgtgaaatccttgtttgtgtcagctccaggagcatgttgctaatttcgaggaattaaactaatgctttacgtggctccacagaatatcagaggggattacagcctggcaagtcctcgctgacggccttgctgacctttgccacacaaggggactttttttcttgttgcttttcccgtgaaaggtcccacacggagctgatacctgggcctggcacagcctgtggctctgagacctggcgtgtggggcccgtcacgcctgccctgactgttggctgtggatcgatctgggccctctcacagcctctgttccccgtgtgtgtcggtctccttgaggggaggagaggtgtggatcatctcggataaagtcccaggggcattcccctcttaacctctgatgcgatctcttccagtcagcaaggcatcctcactcccataggaaagagatgaaaggcaggcctacttgttcaagctagacctcatttgtgctatatgatgcaggagaaaaaactccatttctcaatcccttccactgggagcttggagccttgttctgccacttcccgtctctgtgaacttgggcatcacctctctgagtctctgcagtctcatctgtaaaatggttgtaggaaaacttttcctcttagagtctttggcccaccccttcctaccctgctagctgagtgaccttgggaaagttacttagcctctctgtgcctcagtcatcatctgtggagtggagataatggctatacccacctctggcttgtgatgagcatagcaagctcacagatgtcaaagttcttacacaggggcctagcatgtaggagatgctacgtatgcattcgttattattttcaagtgttttgctcccactagatggtgagtacatgttagttctcctccccacaaaccatggggtaggatagggagcccctcctttcctccttctccctgttcaggccactctctctggctctttcaggagtgtgagacctatgagaagtgctgccccaacgtatgtgggaccaagagctgcgtggcggcccgctacatggacgtgaaagggaagaagggcccagtgggcatgcccaaggaggccacatgtgaccacttcatgtgtctgcagcagggctctgagtgtgacatctgggatggccagcccgtgtgtaagtgcaaagaccgctgtgagaaggagcccagctttacctgcgcctcggacggcctcacctactataaccgctgctacatggatgccgaggcctgctccaaaggcatcacactggccgttgtaacctgccgctatcacttcacctggcccaacaccagccccccaccacctgagaccaccatgcaccccaccacagcctccccagagacccctgagctggacatggcggcccctgcgctgctcaacaaccctgtgcaccagtcggtcaccatgggtgagacagtgagcttcctctgtgatgtggtgggccggccccggcctgagatcacctgggagaagcagttggaggatcgggagaatgtggtcatgcggcccaaccatgtgcgtggcaacgtggtggtcaccaacattgcccagctggtcatctataacgcccagctgcaggatgctgggatctacacctgcacggcccggaacgtggctggggtcctgagggctgatttcccgctgtcggtggtcaggggtcatcaggctgcagccacctcagagagcagccccaatggcacggctttcccggcggccgagtgcctgaagcccccagacagtgaggactgtggcgaagagcagacccgctggcacttcgatgcccaggccaacaactgcctgaccttcaccttcggccactgccaccgtaacctcaaccactttgagacctatgaggcctgcatgctggcctgcatgagcgggccgctggccgcgtgcagcctgcccgccctgcaggggccctgcaaagcctacgcgcctcgctgggcttacaacagccagacgggccagtgccagtcctttgtctatggtggctgcgagggcaatggcaacaactttgagagccgtgaggcctgtgaggagtcgtgccccttccccagggggaaccagcgctgtcgggcctgcaagcctcggcagaagctcgttaccagcttctgtcgcagcgactttgtcatcctgggccgagtctctgagctgaccgaggagcctgactcgggccgcgccctggtgactgtggatgaggtcctaaaggatgagaaaatgggcctcaagttcctgggccaggagccattggaggtcactctgcttcacgtggactgggcatgcccctgccccaacgtgaccgtgagcgagatgccgctcatcatcatgggggaggtggacggcggcatggccatgctgcgccccgatagctttgtgggcgcatcgagtgcccgccgggtcaggaagcttcgtgaggtcatgcacaagaagacctgtgacgtcctcaaggagtttcttggcttgcactgaagccccccacccctccctgccccctccctggccttcttccacctatccaccccaatgcctctcagcaaactgggcgaggtcagattagacaggcttgggacagcagggaaacatcaaccgacgtgtcacagaaaaagccacagaaggtctcagatcagcatctattctttgggttcaataaggggttcatatcttttttagctgagggggacaagaggagaagtcagtggacacatggaagttactcgtgaccaccagcttgctcagatattctcctcctcccctcactggccccacacccctggctctcccagtcaccctcccctagccagtctcccagcaagggtttaagagatggccgctgtgtgctggtcacaggaagtgttgaatggattggcttgcaaagggggtaggtggggagagataggagggcccagggactcatgggacacctttcccacagcctcctcgattgctgtgagcagaggccactcggagttaggggcatgggcaatagcaagctggcggcagagtccagcccagcatatgacttgccctgaatggaagctgctgaaacgggtgcctttgggtggtggtcggcttgcctctgaggccaccacggcaccagcagaatacgtatttcttctccttggctgcactggtttgtcgatctagttcagttcaactcagtggatgttctctgaatgcttactgggtgccaggaccacagagagatgttagtcactgcccagttcttagagccccaacacagataccctcatcccagggcccccagacacacccctccgctggactcacaactgtctggagtttctgtctgatggatggtgtgctttcatatgccactggcttccttggacatagatcagacaaaagccccgggatctgtttggtagcaggagaaatgaaggaagatgaaaaagcaggcagggaagggggtagtaaaggactgagagaggagggaggtggctggagaaggaaaaggaacattgctcgatgctcccatctggtggcggcctcaggaacccacgggaacctggaaggaggctctttgtgagacctgggcaaaggatggggcagctcgtcgatgatttttttgtgtttccaggcttcctgtgtgatcctggccctccggccgctagagagaggattgggaaaccccactgtcagctctgcatctgcccccactaccctcctctgccctattctgtccctgcccctccaagctgaagaaggtccttgtggggcgtcctcatttcttcctcaaatataaggaggaagataccaattaaaagctcatagtatcaactgcccttcttgtgtgattcgtttgggttatgatgggggagggagggaggtgggtagtgtcatttgctttggtgaccttacaagagggaagtctggccactgggagcatctttgggggatggagagatgctggtaatatgtgggccccttttgcagctccaaggccccttaactgatgctcagctcagctccgtgagttaagctgaggtcagagaggtgaggtgacttgccaagaacacaaaggcaggaaggggtgggtggcccagcccaggtgttctgatctgtaacctgctctcaccccagcgtgacagcacagttggtcaggtgcagtgtccagacccttccaccaatggtgtcaagttcagaggcaagaaggtggaggagatgggaacggagcaggcaaggacagctgccagctgtgactcactagggggcctctaggtgaggcctggtcccaggaagactgtgtcaaagccctaggtaaggtcagggtgtggggcttggttcccagaatggggacagcagtgcctttggccccaggaaggcccacagcagctcccgaggcatggagacgtgttcagccatggcacaccccacagcctgtttgtccccaagagacaccacttccctgcacagttgcctgtgttttcccgggccccaacccaaaagaagaatccaggcccagcctagcctggcccagcccatctcatctgcaataagggcgtgaggaggaggtcgggagcaggaagaacagaggcagaggatccagggtttctcaagttgacatcgggagaacactgagcacaaaacttagccaccaaagtggtgtgagcagcagccacgggtccccaccctgctcaggtcaggtaaccaaggagggtgaggatggtctcaccctgtcctcagaggcccagggacattctgtgcacctgcttccagctcgagctctagcacattaccatgcaagctgtgggggcaattgtccacatgccagcacctgtcacctcccttttcaaccccatttgcacagatacgggacctgaacgtgcggctgggccgggacagcagggcccccagtcgcacgtctgcttccctgatgaaggtgtgaggttcaggaaaatcccactgtggggctccctctcaccagaccactgcccacatacagccccagacctgggatccctgtcacactccagccccacctggcagagcgagaaaactcagcccgtgaagtcagacttgcctaggtctgaatctgggctctgctgcttacctgcaatctctctgagtctctgtttcctcatctgtaaaacagagggtagtaagatcactctacaagaggcttgggagctgggccctattaaccgggtacaactggaaagcccaggaaggaggacctggcgccgagtggctgccccctgccccctcccaccctcggcagctctcagctcagaacagaccccagaaccgaaaggcctcccctcacgtttctgggtctgg

SEQ ID NO: 669 - DNA, 18737 bp, Homo sapiens
  source 1..18737: mol_type = genomic DNA
agttaagaccagctggggtgcttctggtatcagtttccagcacataagtctctgtgatctgcagcagaaattcttacaacagggcccttagaagtctcgtcctctgatgggctgccagaggcagagtccaaggcatatctctgcaggcagactttttttgctgagtttcccagggactgagagaaaactatcagaaggaagaggctcccctgtattctacaactagaaatctacaactgtcttgggcggaagatgggatttattgctgtctagctacttatctggttcagttggctcagcggattggagatgataacagtcacagattcagcatcttgagagagctcttttgagtgaaatgagtatgcttgaaatctggctctcccctccctaattccttttcccagaatacagctcagagcaccttacctccagctaggaaaaagagtttaagtgtatgccctctatgtggactccagagactacaggtgcttgagtaaccaatgcaaacttgcagtcatatggtgattttcttaacatcactagtcaaaatctaggcagctgggctcagatcatgaaatgacataatattagctctcatttatgtgtttattaaatgattaatgatatgatctttacaacattttatgcatatggacactagaagcttaaaaagtttatacagtacagtaaactttaggtctcacattctactggtcagtgaatattttgtcgtctcttcaatcaaaatataataaataggaaattaagctcctgcttgctgagaaagaaatcaataatttaaaatgtgcagttgtatacatgtttggaattgatcttttacttcattcatcaagtctaaatagcataatcccctccgatgagagtagagttgaatgctttatattaatagacataaattcgattatgaaagagctcctcaacttcatatgtcaggataaaatatctgtaacttcttatattctccaaataaaatttcatgtgatctgacaagattatattttaaaattcaaccattttaaatgacttctgcaattaaaatagattcattttccttgaaatccagaagcaaaagtgaagctggagatattaagacaagatgggcgccaaaaaaccctggcttatgccaccttggggactgaaccatctttcaggtagacaagttcctgtcaatggctaaggtttcctcctcctgcagtcccccagcaaatgcagtttccccctccccaccatgtgcgcgcgcgcacacacacacacacacacacacacacacacacacacacacacacgtaccactctcctccctccagccctatggtagctccagtaagagattcagatctgaaaaagaaattttgataattttgcaaatgaaaaaactgagactcaaagttgaaatgagtagtccacgatcatcacctgctgacaggagccccggttacccaacccaacccagtgctctttccactgcccctctcagcctgcaaaaaccacagagggcaaagccagaaagatggaaaggcacccatgcagctcaccacttgcctcagggagaccctcttcacaggggcttctcaaaagacctccctatggtgggttttgtttatttttggagaacaaaacaactttttcaatgtttcaatggagagatctgtgaattgtgacgtaaggaaccatagacaccagtaaaaaattttgacccaaagacacggtaatctgagttttaagatttggggatttgatcagggaaaaaaaattttacatatatatatatataacacctaacatatctctctctatacacacacactatatatatgttttgaattaggcatgcagaagtatgttgtagtgaaaaaaacagggtcttggccaggtgccatggatcatgcctataatcccagcagtttgggaggctgaggcaggaggattgtttgagccaggaatttgagaccagtctgggcaacatagtgagacccctgtctctacacaaaataaaaaatacagctgaatataacggtgcacacttgtagtcccagctactcaggaggctgagggtgaggatcgcttgtgcctgggagttgaggctgcagtgagtcatgatagagccactacactccaacctgggcaatagaatgatacctcatctcaaaaaaaaaaaaaaaaaaaaaaaaaaaggaggggcctctaaaggttgattgtttttgagtaacctcgagcaagtttcttaatctccccaaattaatttcctcatctgtaaagtgagtatcaattttgtatagagaaagatggagaatgagacagagacagagagacaaataaagacagtaagagggatttgggagtgtatggcagctctcagaacatgaaagttcacaatgcctggaacaaaattatcattcaaatatctgttcactgaatgaaaaatctgcttcctcagctgggtcagctcctagaaatatgtctcctttgttttggagatatggacagaatgacccctaaggctctagcccatacaaaagagatgcaagaccactcacgccctaaaattgtgtcttgtgtttgaaaatgtttgacacagtggtctctgactctcaggacagaataccctctgagtgcaccccaaaggctttatctggatgcgtagatggtgctagattcccagaataataatgaaggtaacattcaagtgtctcctccccactctgatccccaagactgaaataagtaatcttcctttgtgtgttcacagcacactctactttgtacatttattgcacgtattatagctgcatgctcccttgtctgtcttgccaagtagactgtgaattccatgatcatttgagtaagtgctatccccactttctaacccataacagagactcaatatatgtttttgattttttaaaaaatcaaacacctctttaaaacatctaccaccgttggccctaaaatcagcctaaggtatggatattgtccagcacccccaacccggagattgcctccccacttccaattccccttgaaatgaagtaaaaactgtagttccagcatttaggcctcttacatatccactcaggatgttcctcattgttaattcactcaataaattttgttcaaaaacaggatcttatgtactaggcccaatggcaggggtacagcaatgaatccgccattgtccctcttggagaagctcacagaataaagtgagcttggatgaaggctctgactttcagagaggccactagccgttagccaaaatatttctggatcagtatctacatcctatcatcaacttgactcctcgactctttaaaatgtggctttagaacctggtacatagtgtacactcaataaacatttgttggataagggagtgaatgggataggatgaaaatttcagtgagcttttattgctcactgattgatataggagataagcagctaatgctatctaatcctttttttttttttttttttgagtcggagtctcactgtgtgccataggctggagtgcagtggcgctatctcaactcactgcaacctccacctcctaggttcaagcaattctcctgtcttagcctcccgagtagctgggattacaggcatgcaccaccacacccaaataattttgtatttttagcagggacagggtttcaccatgttggccatgctggtcttgaactcctgacctctggtgatccgcccatcttggcctccaaaagtgctgggattacaggtgtgagccactgcacctggccccaaatcctttatttaagtaattttggctttgggtacccactgagctgatacgtccaccatgggaatgtattaacacttcaaaagatctctaaggacagataatgcttcttagaaacatttcttgtgtctaattaggtgaggcaggctttcccaataccacagctaaacacgttgcacttgccttcagataactctcggagaccttccatcctacaaaacactgattaactaaccttccaaatctgccagtaactggaacacttcctgcttctgaactatcttcggctccagggagtaccctgctagattctttaatctctcttactgatcatctaaacgtattttcttttacacttgtgtatggtttatttgtacagttgtgggaagagagcttgtctttataaattcccacaggactaggcacacagcaggtatttaataagtacgtttttaaaaatgtgtcttccatgtgtagccctgtcctgcagggacgcatcgggtaggtggcaaaggggtgcccaatcctagcgaactttcaactgaggttgggggagaagggcagggaccctcccaccatgagaatcgtaaggtaggactggagaaaaagatcagagcacatctctcatgtactctagaactctccagaaacctctcactttctttgtccccatcttctgcaggggacttacagcgttctcagggactgcaggaaataagacaaatagggaaaaggaaatcacagagcacgattgaaatatggcagatgagatgctagactggaatcttctctttcgctcaaaataaatgcatacataaatgacagtgattgtaagcctgacagcacttcacccactctctaaagtctcctgacagtgggacctcaagcaggggactggaaggttaatttgttcggtaccaactctgactcaaaaagattattctcctgtgaggtgaaggagaagaaaaaaaggtcagtgacattttccagccactacacccagagggtaacccagatgttggtgggatgggtgggactcatcaaacccacgctttcccccaaggttgctaagacagagcgtcctgttagtcttcgggttgaatcaaccccacaacgacccgttctaaggagactgtgacagcaggaaaggtcatgacacacccaggtctggacacgctgtccctgaggccagtgcccggagcgccccccgcggagccgctctccaccaataagagcctgaggtcccgagatgatgagatgcggggccgctgctcagccaatcaggctccaggcgcggccagggggaggagatgggaggagaggccgggggcgatggagacgcggatacatcaacagaagtttctcacctaggaatgcgaggggcgctcccgcatctcctgcacatctccacccctgcgcaggaggagatccccaggctgctctctccatctctcctacagctccctgcaaacgagggggaagctgctgagagtccctatcactgctggccttttaatgttgtatgcaaggaggaagagggcgagggataacttggtgctggacaactgacctgcggcccgaagggcctctggggagggggtgcaaaagaggagcggctgggctgggggactccatgcgggggcgatggacagggcggcgctcctgggactggcccgcttgtgcgcgctgtgggcagccctgctcgtgctgttcccctacggagcccaaggaaactggatgtgagtatggaggtggcagggaagcatcgggtaggtggcaaaaggggtgcccaatcctagggaactttcaactgaggctgggggagaagggcggggacccttagacgagtgacctaatttttcggaaaacatctggaattggggagcggcttaacgctacgggcggccgtgtcttacaggtggttgggcattgcctccttcggggttccagagaagctgggctgcgccaatttgccgctgaacagccgccagaaggagctgtgcaagaggaaaccgtacctgctgccgagcatccgagagggcgcccggctgggcattcaggagtgcgggagccagttcagacacgagagatggaactgcatgatcaccgccgccgccactaccgccccgatgggcgccagccccctctttggctacgagctgagcagcggtgagtcctgggtccttaggggttggtgggggacggaaggcgacaactcctccaccggttcctgcaaataaagtaaatagtgctacgtggtcctgtagctctctaagttccagaagaagccctttagtgcacggggattgagagctacaaaggccagacctggggagcaggtgcgagcctggagggaggtgactccccagttccagagcggagctctaggggctggagctcttcctctttcctgcggtgccccgccagagttggaaaaaaaactctaattctcctaccccgccgaccccctcggaccccgtagcgcccccctacgtgggtgaccagctggagaaacatgatgtcggcagcggggaatgcggctgccgcatctgctttgatttaaccaactccgctgcgcaccaaaccccggacaagtggctaattgcagcgaagccccacctttattggctcctaggagcaccgagttgacagaataatggtgacttttaaagcgactgtccgcgaccacccaacgtgcggctaacctgagcaggaccacttgtgcgcttctcgtttctttggcttttctatctttccctcctcggcgcactcccgcggcgcgggaagctgcaggaaaacaaagttccacttccacgtgcgtagtgacttggtaaggataaaggtacagggagccaggattgttcctggaatatcaacagatccaaagaatgttaggactggggcgctgaaggatgcgctgtcgtttttcatgttcatttccgttccccctccgcctttgacccttgtccacgcagtccctgcgcgcacccccgccgagccgcgcacctcccccgcggcgttctggccggcacgcccttccgaaggagccctggtccccgtagagagaaaaaaaaaaaaaaaaaaaaaagagacagaaagaaaaaaaatagatgtgtttttcacagttgctgaaatgcatcagctgttgaaaaggtttattggacagcgggcatgaaactgtttctactccaaactaaacatctggaaagaaaaaaaaaaagtcgcctgctgattcccttctagtccatgttattaatgttttaatggactttaattttcaaagattttagctcaaactctactgcaggtgtgctaaatgcataattttcaatattcaatatttttaatagaattatgtttttgctagtgacattttaattatcttacctttcattgcctttaagactgtaagaggagtagctaatactatataaaatgtttaactgtttcatgttaatgtgagactaatctttaatgtgaaaatatacggtaccgtttactaattgctttggtctttccttaattttaattttcattctgacacgtattatttatgcaaacaaaaatcacaccaaaatgttcagcttgtgttctgtgagagcacattttaaatttcaaaagaaaagcaatctagtgttctttgggtgttgtattaccgtttacagtatctatgcaaagaatttttaattcagcatgtattactgagctatgactgtcaactgtgcactgaactgggtgcaaacatacatttcaaatttaaaaaataaagagatgattttaaggtaaagggacaatgtatgaccatacagtatatgacaatctcttcaagtggaatactgaaaattaatgttgctttttaagagactagaacaagagcaaatcttcctttctaaatatgtactcgttaacgcatccattgtaagcaactgaaaaattacttgtccagtaagatcatgagtaggaggctttcttctgaacataaacagaagttgcctggttctctaatttagcaatttatattttttctaggcaccaaagagacagcatttatttatgctgtgatggctgcaggcctggtgcattctgtgaccaggtcatgcagtgcaggcaacatgacagagtgttcctgtgacaccaccttgcagaacggcggctcagcaagtgaaggctggcactgggggggctgctccgatgatgtccagtatggcatgtggttcagcagaaagttcctagatttccccatcggaaacaccacgggcaaagaaaacaaagtactattagcaatgaacctacataacaatgaagctggaaggcaggtatgtattagaaaatggaataatcaaaacccagtgctgttaggtaaataactaggattacacatctgcatgaaactgtccaaatgacttaaaaaccaaacactggcagccctcaagtgggatcctgaaaattaatattgtttttaaaagactacagcaatagaaaattatcctttctaaatatgtatgcgttaaagcatccatggtaagcaattgaaaaattccttctctggtaagaggatgaataggaggctttgattagaataaatatacgtgtgtgtgtgtgtgtatacacatttgcacatatattacaaatgtgtattatacaaatatgtatataccctttcatgaatatatactaaccacaattttggttctctaactgatatgagttaaaccgtgttatagcatgtgtttgtggttgtatactgtgtatatctaaaactttgatataatataatagatgcacaatgcctgtagggttcattggttctacccgcttagtcgtggagtcagaatagggtctacagtatctgcctttctaatagaactgagtcaaatttcatttcccccaatttgaatttttatgatatttttttaaatcgactttttagtgggcaatggctcctaaacatgttgtcagttttgtacttacctttttctagcaaaccttctttggtaatatgtgcccttaactaatattttttgtaaaggaaagtttttttagggaaatagttattttattataaagcaatgtaggttaatttttaaaattcataaatactcctaagcataaagaagctataggtatattaaatctatagatattttaaaatatcagtatcttaaagatacagaggtggtacatttgaagaattgctatgtaattaccatcctttatgaattctacatttttatactgttttcttaaaatgcatcattcttgtagctaaatttgacttatacatattcacattagtgaatattgacacaacaaagtttgaattctacaacatagttgacttagttggcaattcatagtgacttttctaaaaaagtctaaatcttttatatgaatatatattttctatgttgtaataaactttttcaggacagaaatattagcacatatcatatattcttgtaaatattcaataacttataaaggtcccaaagtaatcattgcaatctgtcacattcttttgaaataaataaaacaaattgcaatatctcttagtaatcttaaaagtatatgttgcgtttgttttccatttttggaaaatgaataaatggaacgcatttagaatagttacaagttactcccagttttctttactttgtccatttaaaatacaaaaacagaaaagtcggtaaatatatcactgtaacacttcaaattcaaattttaattttaattcaatttaaatatttaattcaaaatagcaaaatagaaagtaggaatgtcagtaaatagctatgtaagctttttgtatttttgtttataaaattgtaaaagttattttatttcactagaataactcttgcccaacaccatagtcatgcacatgcctcttaaggttttacatttaaaaaaataaatgactgagatgttgcttcaatttaaatattatccaataagggaatttttattatttctagcatattaattttgaaaaggttaaatgtaattaggatatgttcttaaaactctagagttaaacctagagataagattattcaaattaatatatttttaaaacaagaaaacaaataaacgagtgtttgttatcaacagaccttaaatcttctttggccattctttaagtaaatttggtagagatttttaataaactagaaattcagaacacaaaaactcacgttatgattgattctcttaaataaaatcatcttgggacttacaaaaaaccctaaagcattctaaaatatatttttattagtaacattcggcagctatttggttttattttatattgtgtgtttttcaaattaggtagtaatgttcctctctgtaactgttaatgctaatcttaaactattatttatatcctgattttattaaaaacatacttcctattcaccattaatttaaatccatttttattggcaaaaaataattttctaacattacctaggttcttgctattattctaactagcttgaaaacaattcaatttatgcatatatgtacattttgtgtaaatctctgagttttctctcctgaatcatttttttcacattgttcatttttggttcacattgtttcacatttagatgaaatcttaaaatattagaaaacattttcctggttatttggtaggtactatgctggtgtttttgttgttgtttttattttctcttgaggtattataattcaacagagttttgtatttttctttctgttgctggcaaaaaaacaaaaacaaaaacaaaaccaacaacaccataaaagaggtttcctggttattatctaacatggatgagcaatcaactcaattttttcaacattggcaattaggattttaatctaataggcatattcttctgaataaaatccaggtctgtattcaattgagttgattttcttagcctcaaaatcacaaactcaaaatgtaggaaagtgttcagagaaatgtgggtactggcgcttagtagtactgtgagcaggatagatgattttctaaccgctaaccttaaatactctgattcccacttggtttctgacaccattcctaaacttatgactccaagaataatgttgccgaatgatgattggctaacggaatgatgtgatgtcttccaggggcagaacttctgggaataatgtgacttggaatatttatgggtatttcttttggtgtgcttaaaatatttccattcttcccatgtccacctcacaaacttttaagtttccctaccccataatttgttttatgatgagtaactcaacaaagtgggaagggctcaatcccaaattttcattgacctattccaagaatatttataagtagttgaacaacacatagtgttttgcttttcagtaggttcgaatatatttttggacagaaagggacaaaacgggtcagaggaacaggaatcctacatacacccatccaacctcgtgtcgcagtttttataaaaacttagatcatctgatagttgagaaaatgaaatgttagtcacaaaacgttccacaacaattttctggccatttttgtaaaattcggacaacgtaatttactgaaaaacaatcgccaactgccacattacctctgagtcaaaattgtggaaccaatcagttcttaaaccacttctcaagcggtttctatgtttacattaagtattaatgatgcatctttcctatttcacttcattagaaatttatcaaaccaaaatttacacaaggaatccagtagattaaatgctaccctcctgattgctctgacatagtttaaaaatattccaccaaaatgtgcacatctgtttgcaatagttaacaaaacattcctctgttaatatcgttataaaccttaacaactcaactagagtagagaaaggaattttctcataaccacacagcactcattcctttgctattctcttatgttcctgttaacagaaaattatggtgatattgctgtaattcacaatggctatttaacattaattaagaatcctggaggaaaatctccagaatacactttctgggggagtgttcatgcaatttccttaaatatacttgcattttccacttttatttttccctattctactaaaattatcctgctgcatataaataccttatattatttatcaccagctttccttatgtaagataaacgtcttaatcagactttatttttctgtaaaattgaaatcataagtacctgcttattaactagctattatgtgcaacaaatatcttcctctaaaactaaatcaggtaaaatatttattaaaatatgctctgagaagcagaattctaattctgtagaattaaactttgtgtgtgtgtgtgtgtgtgtgtgtgtgtgtgtgtgtgtgtgtgtatctgtccttgaattttgcatttcatcagtcctgagtggtgattacactgctttattctaattccagattgtccaagttctttccttggaatattatgggggtataatctttgaaattccaggtcaggttattgatatttttttccttgaagttcatttatctttctgtcctagaatacagtatatatatgcatatatatgtgtgtatatatgcccatagatattctaagaatatgtatatacctctatagatgttcgaggatacaaaaataatatgtatcatatataataaagatattatttcttttattatgtttattgttagggacacttacaattcaaagtttaaattgtcatcactgaaaaattataaattccatgtatgtattcaaaagggctaattttctaggagggaaatctttctataatttcaatacaaattcagcaggtgatgtaattgaatttgaaaatcagtctctctttttatccttcatcgtgttgtagtgcataactttcatagagtaacactattgtggacggggctaaaactgaggagttgaaagagagagcccagccggctcaaaacaataccattaacctcttagcagtgacatgtgtttaagaaggtggtttttattactccctcttgattcagtttaccaacagaggatgagataaaagtgttcaagtgagctggaccaattactcaataagtatttgatgagcgtctactttgtccctcatgctgtgcaaattggcaacatcttacatgatgtctgaagtgactaataaaagaaaaaatcggctcctcagtcatgatccaggggagaaacagctttaagtcactaagtgatgactgtaaagaaggctgatcagcttaaacatggaaacatacattgttatgtttttagtgttctttggacagttatgttttgttattacccagcactgattgagctttttctcgtaaactttgggagcttaaaatttgaacaaagtaggcagatcacatttatttgcctggaaatgttttaaagaattgagggttttgtgaatatgaaatgccataaatttaaagaaataagcttctgtgacatactttataaattgctgtcatataatcgcaggacaccttttgccctgggttaagaagaaatagatacatctattagtttcttagttttgtgaattcaaaaaaagcaaatgtgccatatgcactactaagaaatatcaagcattgcataaatcaataccatatgctcttatttaaggttgcaaatgttattatttgtgtgcaatattgtctcattagatagttcagacatttttaaaatttgtttgaaaacataacattctgcaaacgtgtcaatgtcaggtttggtacaaaacagcaaagtgtagacccctgtcattttattgttttcataagaattgtaagtggaatttaaactgtgaggtttttcctttctttggtgagattacacacataatttccaagttattgaatggatggatccatctttcattttacccagcatgttgacagaacgtcaactccacagctagccctgacgatttattaatctgttctgccatcgtctggggattgaaggaagctatgctggctagcctggtatgtaagagattagagccctaaacttttgaaatctctatattgtttttgcacccctagccttactggaaatgtttatctcaactctaactgtaccttctttttcagagaaaggggcttttatttagaccttagtgtgtgtcaggcagtggactattacaaatatatgtagtttcatttaacttcttagtctgtttaaactgaacttagcacttagaattgaaaaaattacataaacattatcccctttgtattttccatgctaggataatgctactgattcatcaaggatagggcatgtgttttgaattaattttccagaaaaggagaatttgctggggggagccaccatactgtagccccttctccttttgaccaactaaaccagatttgtcatagtttctcatgtggcctggaaccaggggatagcatagttcaccacctccacccctccctttgtatgtgactgacttttatagtgatcaaacttgagaactctcaattgaatcaatacgtctcatccctggatgctcattaaaataatctcagcggctttgtgaaagtaccatggcctggacaccccaccccctgcccgaccagtgaaatcagaatctgagaggtttgagcattggttatttgtaaagttccatgatgtttctatgcaccatgagagctaagggtaacttctctctcagtgcttctcaaattttaatgacaatcttgttaaaaatgcagcttttggttctgtaggtctggagtggggcctgagagtctgcatatctcacaagtgatgctggtgttgctggtccctgagctgtattctgagtaacgaggtgttgaatggtatcaggaacatacaggcatgcataagcatcctaccacattcaaaattagaccggggattagaaatagaagtaatttccttttgttatcgcagataatctccaataatattagtctggtccactactttaagtacagcttggaaagctttgctctgaagggtcaagaaatttggacaaaacatttgggacaaaaaccaaaggacgaaacatttgaagcctacgcaattttaaagattatttacgttcaaaaccatcatttttattcaagaggaaatagacccagaaagttaattgattagattaactgtgcttctgttgttgagtaaaacactttatgattgatagttgaacacaattactgttggtttcaggctgtcgccaagttgatgtcagtagactgccgctgccacggagtttccggctcctgtgctgtgaaaacatgctggaaaaccatgtcttcttttgaaaagattggccatttgttgaaggataaatatgaaaacagtatccagatatcagacaaaacaaagaggaaaatgcgcaggagagaaaaagatcagaggaaaataccaatccataaggatgatctgctctatgttaataagtctcccaactactgtgtagaagataagaaactgggaatcccagggacacaaggcagagaatgcaaccgtacatcagagggtgcagatggctgcaacctcctctgctgtggccgaggttacaacacccatgtggtcaggcacgtggagaggtgtgagtgtaagttcatctggtgctgctatgtccgttgcaggaggtgtgaaagcatgactgatgtccacacttgcaagtaaccactccatccagccttgggcaagatgcctcagcaatatacaatggcattgcaaccagagaggtgcccatccctgtgcagcgctagtaaagttgactcttgcagtggaatccctagaaccttggacctgagagtttcccttacctgatcgacatattttcctttatctgatcaacccatcaatcatgtggatttcttgggattctaatgttgaaaaggtttatattcaccttttgatgatttggggaatatatattgacatacaaggaagataatctgtttcctaagcaagaaataacaggaaagatcccttatgccaggaggcctgccatactcaggataagatccttgaatatggaacttagttacaggactcaataatggtgggtgaacattagtcatttttaaaagacacctcttatagcaataaggagacattaacatgaatctcatttattctctcagtattttaactgaagaaattatactgtttgtgtgtggatagaagatgttgaaaagttaacataagcattgggtgctgacttaccctttcatgtacttccaaagaaaggtaatcaaaaagaatcttcttaagtgatataatatccctaaaaaaatgatcattacagatgtttagtgacaaagaatcaatatgtaaaaagtataatgaatgatttagattttaagtgccttttcactgggagaatctggaaaaacctccataaggtatatagcaatctttgatctttagattcatacttttatcacagatcagtttcaactgttaaaaacccacctctgagatactggggggaggatcctgaaacatgcgggaaaaggagaggtaaacagtggaggtaaaaatataatttcatacattgtaaagaaaagcaccctttaaatgtgtaaagacagtgttttgtaaagaattttgtttaaaaagtttctattttgtaaatacagtacttaagttatatgatttatattaaaacatttattgacaaagcctaagagctaaggcagtaaaattatctcataaataatattagcttattttttttcatactattaatgctatttttttggacatcgaagagaatttaacttagcagttagttatatggatgtgtatttcttgctaaaatgacagttttatatgttatagattaaaatatgttgcaaaatatcaaaaatttgtgttatttcagcagtaagattaattgaattctcttttcacattagttatgcttaactcataaggttattataataaattatattagtaaaagtcttaactggaaaaaagaatctaaatcagaatagtgatcaatttgtggatttgatatcctggatatttattatattttatgtaatgctgcatttctatttgaatgttaagtggtctttcttgtttttaatattcatgcatgtatattcatcatattttacaaggttcctggtaaaaattacagggctctatttaaggatgtattttaatgtaaatgcttatgttttttatgaattgttaaatatttcagtattatatagaaaaaaatagatttttaaaattcagaatggacaaagagaatattcattttcttattaataagataaagaaatgtttccctgccccacagtcttcattctatttctctttaattttattcactgaggcagagaaacaatttttgaaaaagagcaaacccatggaaaatgtctcagatctaatattaaaatcaagactaagcatttaactgtgattgtaaagtttgacaaagttattatttactaaatgagagacacagaaatggcaaatatatgaatatagtgcatatttaaaagtggttttccagtctttagcatcccttgaacagaataatctgaaaatatacactctctcctgcctatttttttcaaagtaaatctattttgtcttctttgaacataatcacccatttttaaaaaacagaaagactgtagtgtctattaacaaccaatttcttctattaattagaaaacctttcataattaccttatcaactgactgtgagaatcaggcagcctctaatttacaaagacttgattactgttcagccattcctttaaaacagtgatgctaactcaggcacctctctctgggatgcctaagcaaaaactcctcctaactccaaacctgtgtctttgggttcttcttttcttctcacctttggtatcaccatggaagccatccttaagtttctcactttttttttttttttttaagacagtctcactctgttgcccaggctggagtgcagtgacccgatctcggctcactgcaacatctgccttctgggttcaaatgattctcccgcttcagcctcccaagtagctgggattacaggcatgtgccaccatgactagctaatttttgtatttttggtagagacggagtttcaccatgttggccaggctggtctcaaactcttgacctcaagtgatccacccacctcggcctcccaaagtgttgggattacaggtgtgagctaccgcgcctggccatcacctatctatctctcttattggctgacagcctgcccttagcccatttccatcccactcccagtcatggtagaggaagcaccatggtgctcctgggaacacaattctgggacccaaaggctcctatctagtctaaaccacattgcctgcattcattagggccccttatgttgcaagtaatggaaaactcaacccagactgatttaaacattaaatatgttgactcagtaactaaaaacttcaaacttgtgactggttcaggggaagcttgatccacaagctcacaccatgttccctgggctcaggtctctctattactttaggctggctactggccaagtcttctacttcagggttcatgcagtgctgtgtcctaacctctttcaaagtctcccacccctagcatctctgggatctctacttttcttagcaacatggctgccatgcttccagacctcacattctcctacctgccactcattctaaggaaagaggggtcccatcctcaagaaagagaggttctctcctggtttgctcacacagatggaaagaaaaccttttctttctcagaggattcagcaaaggtcttctgagtctcagtggttctaattgattaaatgtgcctctctctgaaaaaatcaccatgaccattgggagttttgggtgagccataggtacattgaaccatcttaaggccatcatgaccctggaagtggaag

SEQ ID NO: 670 - DNA, 24927 bp, Homo sapiens
  source 1..24927: mol_type = genomic DNA
ctcttagagggaaaacacctttaaaaacaattacaaatgtaaaggcctgcaggggccagttaggtgccataaatgactggccaattagacatgcctagccctgtctaaaagggagtagcagctgcttgggtccagctgattgttgctacgtgggacctgtgacatgctcctaggtgaccagctctccccatttttcaagccagaaatccaaattttaatgtgaaagtactcatattttaaatgttggcaactaattttttaaatgctgtgccagtcaaacaaaacacatctggaggtgtgatgtagacagcaagccataagtttgcaacctctctaaaatactaagtgtgccttcccagcattgagccaatagtgttaggtgtgttaaacagcactgatcccacgttgccttgatttagccttcacacttattccagtgttcttttcctcaacacctttctctctcagctaacatttattgagctgttactatgtagtagaacatgctctaagcactccctaagtgttaactcatttttatcttcacaagagcctgaagaggtagattgcaatgctctctctcattttaaagacaaaggcctcagaagcactgtgaggttgtgcatcttccccaaggtgaaaggggtactgggatttgaacccgggcaatctggctccggagcctatgttcttaactgctaagccaggcttccctggaatagatgccacctctccatcttgggagtaaaactcccaagggtcttgtctcactcatgagtcaacctaggcaagctcaatagttcaccaaggtggtcagccagtattccccaagtgttcaaacctcagtccctccaactaaagtcatggttttaaactgggggtgattttgctccccagggcacatttggcatgtttgtagatgtttttgattgtcacaaatggaaggatgttattggcatctagtgggtagaggccagggatgctgctgaataccacataaaataaatccctacaacaaagaattatccagctcaaaatgtcaacagtgccaagatcgagcaaccggcacaaaatctaaagagcttactggcaactgttctaagatgaaaaaagccacctgcagaatattccaggtggttcagtctgttcttcatcttgaacatcgttttagttctctcctgaagtcactctttcttcccttgccctagaatttcacggtagtcccatctcactgtgctaaatgcctacactaaaaaaaaaatcttactacaactcttagggattaacagcagcagagcagataagaaatgaaaaaaatcagcaacaggcaaaagaaaaatgagcactaaagtacaaaatacatgcttgagcttcaaccaccatatcatctacatacctgaaatgtacgtgtgtttttctggataccctaagccgtaatccgtgcccacatcaaacttcaatgaacactctctctgctaaacacacacgcacgactgcactggatttcataaaatgattttaatagaaaagtacaagatatgaacaaaaataaataatctttatctcatttctagcccagcaaattgtacactgcatataaaaatggtctaagatgcaattttcctccattccttttttgcttttaaaatactgagacagcattttaattcaatattctaggttcaaactgatacattaaaaaaaaatcataccaacctttaatcattctacatccattttttaaagttagctaacaagatgatgtttcactaaaataaaatatccaatcatcagattaaagtgtaaagtttgtgtgaacagggaaattagatcatttctctaagttttaattcctatgtttctgaatgtttcttgaattaaaaattcatttcatcatcttactttcaaaacacggcatctctctttcaccattccacagagagagaaaagactagaaaatactttaaaaaaaataaatattttaaaagtatagcttacagtgacaatgtagtattttagacctgtgccttcgtgcctatttgcattaaatacatgcttcaagttataactaccttttctatctctctatatattgtgggccactaagtgtttgtggactgatgctgctaacgatctcttggagttagctagtaccggtctcttattcagagtatttactctgctatagcgtcatatttgataattctagtggcttgaataatgttttgtaaaaacaaattgaaacttggtattggcaaaattgtacgagaaaagagctagggtaggcaactaaaacttacacagtgccagtctcaggaggtcagtagctcacagaactcaacagataaactggattaaaacttaaaagtcttctttctatttgagcccataatgactattttgaacatggctcttttgctgctgcctatatataaattttttattaattttcttgtattgggaagatcttgaatacgctccaggatgagaagaaaaaatacgctgacactgctaaatcgggtatatgtttttgcaataaagaacactggtcaatatacaactgaggaaaaactgaaacagatgtgagtcctagaaccacaagagtttgaatttgcccagaaatgctattttaaacactctatatgttggtctgctgtttttttgtggaataatgcattcttggcatccttaaaaggtttcaatatgttacaaggttatccggaaagagaaaaagcaaaggctaatgtatcaatctgtggagcactgtccagatttccgtgtacatttttgaaaagcacaataacttgtattaattgcacttaacacaatgaacctttagtttccaaccagttttcattctctgcagacccgggctttctttttataaaaactgctttcaaagggcatagagacaccacacatggtccacagtaaattcaaatagagaggtgcaatagttgcagtggtaaacacacaaaaaaatacatttttttggactaaaaatctggtcacggataaaagcatgtgccttttcattcttctctgggatgttacaacagcaacacgctctaaaacaattaagttacatgcataatgctaaaagaatgtgagcaatcctataaccagctttaagccatctgcttgatttcttttttttttttttttgtaaggaacatatataggaaaagagaattccccttttgttccattacatatagaaaccttttgaagcttccaaatagcttggttttggtaaaattcaccactcttttattactttgacatgtagtcatcctaaactatccgtcatggtttctccaaaaatctccacatgaattatctgaaggacaattgaaaccacttaccaatatacaagtaacgttttattttatattctatcttccatttggcataagcctttcgatgtttgttttttaaaccagtgaaatatacaaatcacgcaagacagaaatatgtacattaaaagtacagaataaaggctagaagatatacataatatctgaatgacatgtagaatattttacattaaatagtttcttttaaaagctaggattgttaaactcaactctcttcataaacatgagtcactaaaaaggaacaatctgatttagcaaataaaaaaagtacttcatggtttttgtataataaaaaccaaaaaagtgacattttaaactaattagtgctttttgctttcaagatcttttgctcacaattcactgcaactgaggggatgtgaatatcattatgcaataaattaagagccacagttggctgaggtgatatgaaagccaacctgcctaaggggggtatgaaagatgtgtatctttccaaacttttaaaacaacgtaagtctgagataagaacatatttgatggcactgtttggaaagaggtgtccttattaaaaaaaaaaaaaaaaaagctatctatgtagtgggctgaatattccttagggactcaattaataagtactgtcatttctaataggcatgggtttccattctgcagaatgaactaagaaaagagaaacattgctgatgcttctgagttttgaatatctcttaacgtccatgtctataacgaacaagtaatgccctctccacaaagtgaacagaaatggaggttggagacaaaggggtgaggcagaaaagaaaaaagatatcttcaacccaacacgcatttcagtgagtcagaactcaagcttcctcagaaacaaggttgcttcgtcgtgctcaaggtatgatcacagcagggccacagcccaagctcaagactcaaaaaacttttggaataatcccaactggactgcagtgaaggacaacaatgctctagacagagaaataaccccagagtaaactgtaaatctaaatcactggctgcaatgagatatatttatatttatatttatatatatgtatatatatatatatgttatgtacaaaagactttgagatatcaggcaccattaaaccacatttccccccttataaatgcaactgttcaagtacactgggaacagttttaaggtacacctgcagtacaataggagaagcatgagtggataatctaaacacaggatcataacagtgatacgctgcaacacctctgtgaattccattagccaagttctgtcattaaaacatagaaaactactgctcctcaaaataaaagttttaggaaacaaaaatccctaagtagtgaactgttttccaagcagagctcctaatgtttcatttcctgtcctacaaccaaaggggacccagtggagctgccgtttggaaacgtggccagcatcacatcacaacacggaggaatcagagagggctcagtgtgaagaggaaggtggatttcactgtttttcctcaaataggttgtctgctctggtgcagtgctgaatggcacgcaattaccttgttgcttgggctgagaacctgtgaatgggattcatgtattatttttactattataatttactaaccaagtatccctaagaaaataacaggatattttcatttatgttcaagccaacctccccaaacaaaaaaatctagtgtccagaatcatttggggatctttttacaatctggaatcctaattcttataacagcttcaaatcaacatcttgacataagagttttaaattttttaatttctggggactttcctccctgctgcccaaatttcatgagctattagaatatgacggtctgtctgcaaatggaatatttgaggagaatgagacatgtgatataccttttttccttgagaatatgacattcttgtccttccattgtaaattatcattttgaaaatgcagaaagcaagctagcagccctgctggggaagggaggtttgttttgttttgttttgttttcccaagaccttttatcttgcaccagagaatttacaactcattttggtcatagaagctgaattgtgaatagatttctaccaccctctttcaactggaacctacccatcccatatgatggcatatttgagaaaaagaaaatgtatttctttaccttctggatgtgtaccatgtccacacagctaagttagggtatgtgttatttccccttcattctatactatcaaaagaagtcttgtattaccttttcaaagatccacaaaataaatatttttcttggttcccacccccattattgccaaataataattataatattaataataaaccacagagttcttagatggtaacaggaaaaaaaatggttccggttgcaattcttggggaaaaataaaaaatatttctaaaaaccaaaaaccagaatcactgtactttctataaataagcgggtcctgggagcggggctgagtgctgggtggcacccactacttgcacacaaactggtccacgatctccgtgcacttcttgcacttgacgtagcagcaccagtggaacttgcagtggcagcgctccgtctgcacggtcttgaactggtcgtagccacggccgcagcacatgagctcgcagccatccatgccctccgacgtcttgttgcacaggcggccctgcgtgcccagcgagccggtgctctcattgcgcacgcagtagtcagggctggggtcgatgtagaccaggtcttgtgtggtgggcgagttgaagcggctgttgacctgtaccaacttgccccggctgttgagccgcatggccgccgcgctgtcgtacttctccttcagggcatcacccaccttgcggaagtctgccagctgcagccagcatgtcttcaggctacatgagccggacaccccatggcacttgcaggccacatcagccaggttgtacaccgtctgcagggaaatgggggcaatcaatacacacattcatggaggagccagatgcaggctataggaacaaagttctcctcgaccttctccatggagctatgttccccagctgaattaaggactgtattatatttccttcattaccagaagtcttatgttgccttctttaaaaattcttccaaataaatatgttcttaaccactcattattatatcattatcaacaacaactgtggttttttaataggaacaggaaaaaaaaattgttccagctgtatttttttcagagaaagagcagcagcaacatgtggacactcatcccagaggttgttcacaatgcattacctgaattaatcccccgtaccagctaggtgagaagtgctagtatcatcccatttcacagagaaggaaagtgagacccagagagatgagccactcacccaactcccggggagtaaaggtgccaggatttgaacccaggcagctggactccaagcccgtgcttagtgacttgcccatggatatccagccggtaagtgcagaattgggaagagtccagccccagtgggatcagggttcaaatcttaacccattactactattattgctgtgcaccaggcactataagtgtccttacactcatgatctcatttaaccatcccagcaacattatgacatgggctggattggatgatggcacagtgatgctgagtggcctgcacaggtcacacagctaaagtgtggggggactgcgcctggaactcaggtatcctcactcctgtttcccacacagtccctaccccatctactaccccgctaggctaagagcacccaccctggagccaagcaacatagattgtgttcctgactctacccttgaattcagacaacaggctgcacctttccgggcctctgttttctatctgcgaaggcagcagtggtggcaccaacctccaagtgctgttataaggataaaattaggggagatgtggaaagtgcttggcacttaagacacagtaaatctggtctttctttagggtaacaacggacacactcaggaaatctggtctttctccagagtgacgaggacacggcatctgggcccttgcccagtcaccttgggcctcccagtagcagtgcccacgggtctggccctataacactgtgcccagcagtctgggaggtggtggttgcctatttatagactctgctgcccacagttccttgtgccagtgaccctccagagtccacgtggtgtgagtgtgctggagaagacctgtcaggaacctggaagctgggggtgcatcagaaggcctcttccgcagagaacagccaccctcttcctccagggattcacaggggctcttttaaagggggccaaagtgtactctcttggcataaagagtttcaggcactcagctagtctgaggaagggttttgcaaatgtatttaacctttgctccccactgaggaaaattaaaaagctaacaccccatggaaattctaatatgattttctggcacagtgcccaaatttccatcccctagccccaccatcccagagcaaaaaaaactgtcttcttcgtaacctcactcaccaaaatccaaactcagctcactactccaatgatcaaatttaccccaaaaaaactcgctactaaaaaaatgcagaagtgtaacattataggtgcttttcaaacttccccaatcctctcttgccacttggaaatcccttgacccgctcttcttggttgccaagcctctgatgatttctggacatgagagaaggctaagaaagtcccaaagatggatgagaatatcaaatatgggcatacccctggataggggcctttaagagtcagacacatctctctttttgaggcatttctgatctgaggcactgggcatgtcatatatagagatcccagcgatacatccctgaagagggtgatagcaaggttttatgggcttccagagagaatggggctgaccccaccccccccaaattttcatgtggctctgggtccaccacagaagaggcatcccacactgcagacaccatggcagtgagaggcctgagaaaggagaggccacactctgtctgtggcaattatttgacccctcatggcagtacaggcaaaattctgtagagtttagtccttccccggaacacccaaatgtttaacaacaaatttgagaagataagctagctggaattatctacacgatctttgacttctctatgtcctttgcctataatgttttagaagttatcatctatcaagcacttactactggcggacactaaactaagacctttaattaaaccaaatgaaattgttattttgtaataaaaaagagtcaagtgttcacaatttcacatggttcaacctactagatgatctcactgaggcctcacaataacctcaggtaattgtaattgccatggccatttaacagatgtggaaatgggaaaactgaggctcagaaaaagcaaagaacagacaacactgcattttaacccagatttctctaattcccgaactgctagctcttcatctcttagctgtgatgcatgaattcaataaaaacgtacctaggcttatatttccattctttaattttcttccatggtcatgaagtggttttctgggcctcagtttcctagtctttcaaatgagtgtggggccagagtcttctaaggctctgtccagtcctctacagtttactctgtgattaacttccttctccctcaccccaaaatacagaagagtgaaatctctgaccagaaagttcctggcacctaccttgggttctgtgaaaaaataatggccctggttttcaatgctgccaaagttaagaaaagttttcaccccttcattttaaagcagccataaagtgccatgtgtttaaccgcaggaaaaaaagggtctttttaactattgagaagtagcttttcatatccccaccaggggaaggaaagagcgggaaccaggagactcgtgaggactgcaaagatggtcctccctgggtacttctgctgctctcttctctccagagctactttgtgattggcctgatggtcagacctataaaatcccacactgctaaaaatgctgtccttttcctagaaaagcccttttttaaaaaaaccctccatccatcaggcctgctacctaatgacataaagagaggcagggagaaagaaaggagggaaagagcctcaaagctggggtgagggctttcccatctgggcacctacgaagacagaaaaatccctgtcccaaactgaaagccaaccacagacatcgtccaggcaggagggagaaagttattcccatttttatttctgtgctccagtagccaaaggtaccagggactaactaagaaggcaaggaaaggtctttttcaggcaactgctggttcaccttggctgggggcgaaagggaggatgatccgcccaggaggcccttctgggatgtgcaggggcaactatggagacagatggaggaaagagaggtagacaaagggggagaagagagagaccgggaaggaggaaaggaagggaagagggagaaagaaagtgagacgggaacaggatgaggaggaaagagacaggaaagacagagaaagatagggagagacagaaagagaagcagagagatagagacaggaccatatagcaaaggagtggcagaggagaggacggagctacagggagagacccgaggaggctggagggcaaggtgagaagacagagatgcggggcgggggcgagacgcggcactcaccctgcggccggcctcgttgttgtgcaggttcatgaggatgcgagcactctcgtaggagcccttggcgtggatgcgctcccgctcgcgggcgtccacgaactccttggcaaagcggtagccatagtcgatgttgtcgccgcagccgccccagagccagtcccgcggcaggtccttggggcgcgcggcgcggctgcagccgcaggtggacagctcgccctcgcggcacgcccggctcatggcgttcaccacccctgctgcgctcaccgcgtatgtgaaggccgtctcgcggctgcctgtgggtgaggacaagggatcactggccgcctgcctcacgcgctgggccgggatgctgccgggggtgggggtgggggcaaggtagggaatggtggggaggtaggaggtggggggcaaggtagagatggaggggaggtaggaggtggggttggggcgaggtagggaggggggaggtaggaggtgggggaggttggaggttggggggaagtaggaggtggggaagcaagaatagtggggaggtagaaggtggggggcaggtagggctggggggaggttggggtagagggtagggagtaggagatgggggggtagggggtaggggatcaataaggtaaaagctcgggctgccccatccttaacacgcaccaggccctgggcccagcttgaggggaagccaagcaagatcccccaaaacacacagaagcaacaattaacaaaggagtagcagatccccagtatctctgctcagccatttcagagctgcaggccagattctaagcagtgctggattgattttctctgcaactcttttgaaaatagtcaaaacttgctatttgcaaaaatgcacatgaaagaagtcattgaaggaacactcagaatatgggtagacttccttacacttattttaatattaagtattattttcatttgagttacatataaggcaggattacagaatttgctaggccttgaatctaagggagacactgccagcggccacactagtttctgccacactcattttggccttgtgtcccctcctcctctggcagttgtaacctctcctccctcttccttcatgcagcagaaagtatttctcaggacaagtctctttactttcccagaggacaattctaaatcagctcatagagagttataaatgaagcttgctattcttaaatcccaggctcattggcctgatacttctcattcaagaatgagtgtctgcttttaaaacagcctgttgttcttcaatgccacttctgcagacaccccctgcccactcccccactgcctttgccacaaagtgttagaatgacagcaagaaggaaaaaagcacaacctatggggaaaagagggagggagaagttttcttcttcccaaaactagtaaagaatatctccccatataatagttacagggaccctatttgtaaggagaaaactggaggctatcatagagtaccctaaacttcgcttgtacatggagacatttctgcatgtaacaagagctagttaataaaagtactgtaatctgagagagaaagggttatcatccagccagctgaagcgtggggtaggggtgggattggggggcaggctcactttcctcaattgcaaaataagggtactgaaatacatgcaaggaaaggggcctcttctggtgctgaaattcatgtaccgcaatcagtttatcctatacttactttgagagcttgctaacaatcttttttctgagggggaagtgaggagcacaagaaaagctgacaacaggactcagtctgaacgagaagggtcattctgcaggaggacagcgatgccagtttaagcatccagcaggccacctcattcttggtcttctgctccatgccagtcacagccatttgtgaatggtgatggttctgatttaccatatatcctccccctcccatattttcaaaatgaatgacttgaaggtgtgtgctggtggttggcaggaggatctagaaagttcctgtgatgcgttacacctatctagcgggattagagaggcagagcacatcaggggaatggaaaggaatgaggacaatatacagcttctagggagtaatttgatagtacagaaaatgctgtggccctggatgggggatttgtagaacaaagtagctagaggaagaggagatgaagaggagatgaaatgatcctctggggatagaggaaaataagacactgtcctttgagtatacagagcataagaaggctttatacaaaacacaaacaatgcttcttttttcataagtctatcttgagcatttccttttatgccgcagaatacaaacctgggagatccctctaagctaattggtcactgcagggtaaacgtcagtttgaaaagtattctttggctaattgcctgaggatacagtcatcctggttggaatactgctgattcagttaggtttcccttcctgtgaaacccacatctactccgatcctcacaccccttacaaatggtgccttccttacatatcttttcacagcatggaaacaaagaagagacagatggggacaaaagctggaaggaaagggtagcatgatgaaaaatgagaaactctccaaaatgaagagtgggcccttcatgaagtaattgtgcatggtgcctccaaggcaactggcatcttagaaaaatgagttgaggagggggtcagaggtggcggcctgaatttctcagacactggccccatcacagggtcaaattctcacaaagaagaattattctcaatgtccttggtgtgctgagggctttggggtgggcacacacacacacaccttttggcatcaaaggtattttaaattttcccttagctcattctcttcaaatacactcttaagtggaaaagtgaaagcaaagaaattttccaactattggaattggatccatgttcctctttcataaaaatctattgttttctcttctctcctgtctcttttttaattaagtaaaaaacagaaggccccatcagtgtcccaccacaagccacccagcagcagctttcagctctgagacgctaggcacttgggggaccttttgcaggggaggatgccatatgtgctctcatcttcccaggacatcagctgacttgatgatagtatctaggagggctgtctcagagggtgtggagaggtaccactcccatccacttcccatcgacccagacagtagtgccgtgcagctgaagaccagagagcatactttccagggacaattaaatacaggcttttgtaccaagggttctgcttgttccctgaggaagcaggctctttgaatcttggaccgcatttaaaataaatctccagcagaactcaaattcacttagcaaatgatagcttattctgaacattttggcccaaaacaggctacgtatgaaaacgagaggaggatcttaaatcaaagctgtgttcaagtgactacacagataaacagttccgattgctgttttccttcctggttaccatcagaggtgtatgatttttgctaactcatatacatgtgaaaaagtagtcccataggttgagaggaaggcagtttaggaggaacatagaagaagggggaaaagttaccatcctcatagaatttttcaaaagtatttaagttcccttacaatatcaacacacgggagaataaatctaccacactcccagttaactacataagacagcccacagtcagggaaaactcctgtgttcctgaagcttaactcttagattcagatcccagtatatacattagcacattttaatcattaacagaaaggacaaagccccatgaaactttgcaggctgaggctacaggccattctcccattcagtcagaggaacagcttccagtcttgtattattttagtttataaaaccacttggctcaaacatcccctgacaactcttttttgttctcaatgaatgtaattttcggggttttttttttaataaaaaatgcattttatccatctgtgatggacattaagccaacttttctcttcagtcagtatagacagttaattgccttgataaattgcttcttactttgggagtcactgcagtcatattaattataagggcttttttgcataaaagtagagaaacctaaaatattcacactagaaaacatacattggaccacatctgtcaaatagtatcctatactatttaaacaaaagcagaggcaaacaaacagattttttaaaatctttgcctttagcccatttgaaatgctatctctttgaatggggaagtaagacattcaacaacgtatttaaaatgaagaatcggactgtgagcaatactcttaatttttttttcaagttcctaggttgacatcccaagcatgtgcttttattatatcaattgctgacatcacaaacataaattggatcacttttaattaaaattctttctgggactaaaaataaagcttttaacgtctatatctttatagcctcaggaaatagttctattaggaaaattaaaactttgttcactttcaatatatccaggattctaaaagacggcaacttttagttcgatgctcgggccgtttcaattgtggcttaaaaaactaacaggcaagagagtttcgacgtttaaaagcatatacatgacttgcttcccccacctactcttaagaaaccaaaataagtgttctgcttctattttaaacaaaatgctttatagaaaaattaagtgtttgcaaaaatgaaggtgtctgtgatacttgcctcctgatttgattaaaatccaaaacttatcatcaggtgtagggacaggaattaacatcatttgctataatgacaaaaatgcccaagccaccacccgagctggaaggcatcctccttcatgctttctatcaagcatgaagtaaatgctaaggatttcttctaggaaaaaaagttaatgttttaaaaaaatattttaaatgttttcctacctatctgcatcaccctgccaaaaacagaggtgttatccacagtgctgcagttccaccttcgatgtcggaattgatactggcattctttgatgcctgtcttcgcgccttctccgatgtactgcatgtggtcctgatacaagtggcacagtttcttctgtccttgagaaagtcctgccagttggctgcagagaggctgtgctcctataatatatacttctgacatctgaacagggttattcatacctagcgacctgcaagggggggagatgtgcattcaagatttacgtgaaatctcgaggtgggccccctgaaagcatgtcagcaatacatagttttaagcacacagatgcttttttctctcctgcttgtcctcatgacaaagtatgagaagggcttcataaaactcctctgtttaaactgcactcagaaaacggaggtattgtgcagtccccatcctgccatctggctcctcagttagtattttcactcccttcctagcccctgtcaccatatacctgaaccagtatttccaaaatccactcagaaaaggaggaaacagcagtttgagggacaggcctctgacattagagaaagtgacccactttgccccacaaattggaccaatctgccttgaaaacttatgaatgctgaaagtagacacaattagatacgggtaggagatagcagttccttttgactgatggaagaacagagggacaagtatacagactggagaaaattcaccatgtttcttgacattttaaaagggctccttatgtgattgtgagggacccaagacagggtacccagtgaacagaagtcatgtttgacagtcagaaaaatgctgttcatttacagggaaaaaaatacccagaatgccgtcaaaaataatcctctggatatattacagtctatctacaaggcccctacccagaaagaaacccccacttggggacatttgactacttcaagttaacctccttttgattacatttcaagccccaatacttctgcacttggagtgtagctgtcctcctagaactctgcctaattcaaactctgtaggttaataataatctcgagtaacagaagataaaggctgaaactcacttttactacctagaggtggcaaaaagtaaattttgtagataggcttacaattactagcaaagtgaatttctgttcttttttattgcatgatgtactacaagcacacgtctgaacaagggcttcatagaaacaggcctagatttatagtttcccattccctaggagctgaagataagctttacaatattaacaagttaaaagaaaattctgatttaaaactatatataagtaaaatgtatacatatgtcttgcaataaatacacccacactcactatccagcattaaatattgccgcatcatacaaacaaatcttaaaaaaagaaaaagaagaggaagaacacgcacatagaatgaacttaccaccaagaattggcttcaattacaacctgggcgaaggagaaaaatatggccaaagccactaggaagaacttggaagacattgcacttccagccatccccaaagcaactcctgggcttaatattccaatggacttctggagagggaagaaaggagcagatgtttattgcctctcagataattttcaagcatacaagtttaaacaacggaagcatccggggtctcttaagtttactgttgattgactgcgcttctcctccgtgagttttttgatggcaagatataggcagtttctttttccaaattaatccacccacgcaacctcaccaggaaatctgatttcgctgggatcctgtgcgcggggcacgccagcgattacaaacgtgtctcaattctgttgagtcaaagccctggtgccaggcgctgcctccttcctgctcgctcgagtcccgcaccccctggcccccctctagttggtgctgtgctcagtccctcctgggtaattcactcaggaacccgctgcggccaccctccgtcctctccccaacctgggccgagcaacaagtggagccagaattaattccatgggcgagaggagcacggaggcgagtggagcgcgctgccgccagaggctgccaaggaggcggggtggccagcgcggggggtggaggatgggggcaggacgcgggagggaagggcagggggtggggggcgaggccccggggaccagcgcgcgagagtgcccagctgggaaatgcagctccgaattaacatcgtatgtttcataatcagtttacgagccgatgtggggaaagccacttccagatggggaagagcagcccggatttccttaaggacgttcttcagccagactagggaggggagaaggagatgggggccctaggggataatggagagagaggtcgggtctcccaaccaaggaaactggaaaagagtgccaccctcgcccgcgtcgcctgtggcctcttccacggactgagagaagggatggaaccctagaggaaagaagggagtctgggtctcgcttccccggggagaagatcccttccctgccctccccacagctttctcccaaattctgatttttcactctccctcccaccccacacctggcagctgccagggagggaggagatgggaggcccagagagactccagtttcccttggtcctgatctggggttgtgggccactttgccatcgcggcactgcgagcctgtcgttggaactctgccaccctgcctccagtctagcctctccagcccaactcagacttggttcggtcagtgccgaaaggtgggggtgcggggcgaggccagagcccttgcagatgagtccagacggggccagaggcgctggcttccgagccgcagctgggcgcatcgattccagggcaaagaggcccccagcggcgaaggttcccttcctgaagaatttcaggggtaggagttggccttggaagcttccgctgccgttcctccccactggtgacttctccacctgtaggcggcggcggagcgagtaggtggcgggtgcgggtgggaggagcgggttttaaaaatccccttacacgtaagtctaaccctgccgcactgcatcgcccatagcccctgaaggagccccttccacagaaaagaaaagaaaggtgagcctctttaaggcggtggaagagcctggcttggaacctgtgccgtaaaaggggcagaggggacctaggcagccctggtaaagctatggggctcaggggcgtgccaaggtttttctccgtgagccgcccctttggcctggacgcttcggggcttctcaaagaggaaatgcttatgtggtccccagcgcctgctaagcagggctccacacccaaggcccagttgtccccaaaacgctgcaaagctggggggcgcatcctggagaatggaaatctggggtttccccagctaggagagagaaggctccggctatctccccacccccgccctaagtgtcaaatttcctccaggggagggagtgggctgcaaagtctgcttctcgcgcagcccaggctgcaaagtcaactctccccaagggcagccgatgccgcgtgcacacacatcatacacattcacactcgtgcacatttacacactcacacgcgtgcatagacacacacgctgcgacatgtttccgagtcagcggcccagattggtgctggccgcgtgcactttccaagcttcgcggcgagcggggcgcgtggggcggggctcaagcagcagagaaattgataacagattcggcggattacagcggatctctttgttagagccgaagccacacaaaccgaacccactcccagcccgaagcccccagggagagtccaccagttcccagagcccaggccaactgagagcgggcccatccggtcaccaagacttgggtctccctggctccagggtagaggtaggcagagggtgtcccaaagggggatcggaaaggagagcctcacgagtcgcatctccacttaaccccgccgcttgcccggaaacaccttggccctcttccctcttcaatcccagtgcaaccgagaaaaggccccacaagtttgagacactcaaagaactcacagcgaactcacacatacatcggctctgtagggtaaaacatccccgcctgtttaccaagagatcagatccgaaaagacagtatgaaatgagacctctggggagactgtcaaccccaggggtaaaacaaaaattctgatcagaaactgagtttcccaaagaaggggctaaatgttttccaacactttcggggctcagggaagatgactctgtaaggacactgagaatcttcctcgcgtgccacggggaggaggactgggggcgtttgaggggctcagcgcaccagaggagtgaggtggaggagggcgttcccgcgtcctcctcttcaatccagagcagctcaacgacgtggctccctttctatgtatccctcaaagccttcgcgtcggattaaaggtgttcttgatccttctttaccaaccacggtgcgggccaggcgtgatgagggatgagggagaggaaacctcagtagcaaaattgttcagaggacgttcggagggcgcggggagcagccggatgcacacctaaagtctcgcaacacccaactcctcctccgcaggcagtcccttaagagaatagataaaaaggccaagcaaagatcctctcccctcggccccggggcactgccacattcagtctaggcatccccttctgctagactctctacgtttaggccccaagtttctgggagtgaaacgatgagggacgccaaataggcggaagaagcccatttgacccaggcttatggcagcgaaggggaggatgggaaactccaaaaagaatctccactcttggtggaaaaagaaagctgttttccccactctgatctctccctaaagcaaggagagagatgcagaaactagcaggagagcactcagttgcagccaaaaacttgggacgtcctgccctggagaatgcggggagcggcgcgaggagctaaagaatgggccggcccaggcgggtaggaggtccgctttaggggagcagacaaaggagccactactccctaagcctcacgcctgggcgcaagggttgtgtccacagcaatatgtgtgttggcgcgcgcggagcggggtaggggaggagggaattgccagatagagaaggcggaggttacaccttgagccagaatcagtatgacaaaagagagccgcccaggcctcaacactgacagcaggttccaggttcgggtatagagaggccccaggggaagaacggtctggcctggttctcctctgtttcctgccccctcgtccatcccttagactgggctttccaggccccaggatacacacacacacacacacacacacacacacacacacacacacacacaccactcacaccttctcacataggatgtctagccctctcggcagaggatcaactttgtccagaggtggagcagagtccttggacagaggaagaaaatgaaatgatagtccaacccccactctttaaaggtagtttctctcccactttttaatagacgattaaagtgaggcgaaaagcgggaaagcaacacttgttctcgatcatagagagttgggaggcagctgaggccagacccgaggcctcctagggcgacactctccttcccaagcccagaagaagaggtaccaaccctgtgtccagctggccgagtcccatttgctgggctggacccgtggccccttccgtattgcagcggccggcggcgcagcgaaactggtcctctgggggcctccgagggcccctgctgggagagtggggtctggtggtcgggagggatgaagggagcaggggtgggagggagaggggagcagctgcccgcccgcccgccccaaggaaccgaggctcgcaggagtcctacctcaaggcggccaacagggggcagccggcaccgcaccgcggggaagaaaaggccgcggggatggctccgagttctgcgcgcatagtgctaaccccttgagcaccggagcgcacgggggaggggaggagaagacaggggactcttgggccgggcctcctggggagggtcttccgttgagagggtcggggggtggaggagacgaaggctactacgtcctggacccgagaacaactcccctacacacacaaacacacacgcacacacacgcagccaaggatccacacactcggacacacacacatttgtcggcccgcggttcgctgcgcactctccgcattgccccctcgaaactcccctggcagagtctgtctagaaactaaatctggctggttcggcagtgaatgtgcgaaggtggctggggggagggcaggggctgaggaggtgcgacctcaccgcaaggcccaagttacttccaaacagcgaattacccatttaaagagagaagagagaaaagagaggcgagagaggagaaggggcctcgataccagacagggattagaaagtcaaacagggccgtggggtctccagacttgaagttttttgttgttgttttttttaactttttggggggaagaggggttatttgcttccaggaaacatcttaatttcaattctaaccttattttctaagaaacttaaaatgggaaagaccagaaaaatggaaataggaatcgaagcttggaggacagataagaaaaattgtttagaaaataaaaacttatgttgcaggaagaaacgttaacttttcgtaaaagtgaactctcagtgaccctcggagtgtgtgattcggctttaacatacaactgacaattaaaacaaacaagagttcgcaaactggcccccgcctgctctcccaaagcggaggcccaagtgttttctaaaggacaaggcggactccgctcagggggccggggagcgctgtcccggagtacgggattacagccactaccaccacaactccccgcccccaccactgctgcaaagtgcctgagctcacccagtggcggctaataatgctaataacgcgaccccgctccccgcgccggggtgcgcgctggccccccgccaggcactcttaaaggcaaaggggcctgaagcgctcgagttactcggccaaggcaagcctacaatctggcctccgtcggtgcgggggggtgtcggggaaggtgtacgccgctctggagtagttggcccctagttcctctgcgggttctctcaaccaaggagtccctttccccatcccgagccccggccacacaccgtcccggtgcccgcgcagtgggcgcttggtaaatatttgttgaattgaatcattatcctgttactgaaatatacatagtaaattacactcgatgttctcagagcaaaaggaaagtcgtcagtgaaccgcactcagtttgtctactatcgctcttccccactttttctcaaaaatcaaaattgtttgcagaacgggtggtgcgaccagaagtgatctcctgggacactgaggcagtgcgcccggcgtggagggcgaaggggtaggggttcctgccagcgacgctggagttccagcttcttcaggcggttggggaaatggagggataggaagaggcgaagggaactcagttaacttccaacagggggtggggggaagtaaagaaaaaaagtggcagcgcactgaacacctaccttcatggcgagggggagggggcgcggggaggaagtcgccacccgagcgagcgcagccgaggaatccgagcggagcgaccgggttaagcctggggggacggtcaggagcagggctgcggagtcctccggcgcgcgtccggcgggcgcagtgaaccggagctgaagcgggcactggcgcccgggcctggactcccgagttggggcagagctgggatgcgcccaggaatggagggggcgcggacgcgcgcgagccggcagcaagggcagggcctggtcggggcgcaactagggagccgccggtccggcgagggcgcgcaggcaactgttccacggagaggcgctccgtttccaacgtccatcagcgacggcggtaattagggctttccaaccccaaatgtgggcgtgattgtgcaaaagaccttacgacaaataataataaaaagaaattcttcacaagagggtgaaaaaaatgtaccactactcaactgtggcccggggcgggggaaggggggcgatctgtgcgcccaggtgcccccagttcattcacaccacagattctgcaaactcttggcggctcacgcctcctgatctccagctcctcctctctgggtctgtagccgaaacgtctgcttccagacgctgatcctgcagccgcgagttagtgtggacgtctctgtacacacacagacacacaccccaacacacacacccccgctgcagctttggggccacagaacaatcaggcgcgcatggctttttctccgggagatgccgctgaaaacgcacaagtcgccatctgagctgcaagagtcagccccaaattgtgtcctttcattttagggttcggcaaaaacggggagcaaaataggtgaaagtcgccccggaacttattgctgtgcggtgagctggaggggtgcgactaacccaggggagacgcgggctccccccccccaccacgtatcccgttctttctctcttcgggttgatctctcttttccccgtttttccagggcgaagggcgaagagcagcgagtgcaccgcgggcgcgaggctggggaagggcgagagctcggagctccgcggcggcgactcagctccggcggtccatggccggcgaagctgcccacctcctcgtttggcgcccgggtccgaggggcgggagagcgggccggcgggaggcgggcggtcccgggcacaacggcggcggcggaagggctcgctgggcagctgccgcacggaccccggctctgggcggcggaggcggctccgtggagctcgcagcagatttccacgcgatcctgtgccccgcaaacagactgaccgaccgcggggacgcgtccccccctcccaccccccagcccttctggccaactgccttactctctccctccctctctccagactcctctttcccctggtgttctcagaaggaagaaaaaaaaaaaaagaaagaaagaaagaaagaaaaaagttctttaaagtttcagaactaggggcggctggaaagagagagggaaggggggggaagaaagaaaaaactcaactttgctatgcgcatgcgtggtgaggccggcctatgacaaactctgcaggattttaaagccgtactacgggctggggtgccgggaggcggggtacactctccttgtctccccttctctaagttccccatcccccgcggcatctgctgaaagagagaggtccactccgcagccgctgcctgcctgccgcctggttgtctgcgctccttccagagccaccgaccggcgggaggctgaaccccaacttccccgcctggaccccttggctcgcccgcgtatcccagaccgctcccactggggctccacggagactgctgccttgacatggaacctcatgggggacctcctcattcttacctctgggggaggatacttaagcactggggctgatggatagggttaggcgctcacctcctgcaaagtccccagagtagtagggacttgggtagtgggatgcatgattgctcatctggctccggcccagagcatgaggcgcgatgcgtggtcctgccacggagatcttggcgggtgccctcaggtgaggagattgcgaagtttggcaaaaccgggttccgggcaccggaatttctagacgcttccagatgcccgtggttttggggac

SEQ ID NO: 671 - DNA, 17408 bp, Homo sapiens
  source 1..17408: mol_type = genomic DNA
tggagcttgcttgccggcaagtccacacttctccagttctctcacctctgtctgctcattccttcccccatcagcctcctcccctggggtcacatcccttggccccttggcctcatcttgatctacttgtcccccctctctgggtgactcaggatcttgtcttctctctctgctcaccaaggttgtttggaagtgacctcagtcatcactctcttggaagcgacctcagtccccacattcaggtccccctctctaccaacaaccaggagctttcttctgggcgcctgacgtttctgccatagggactcgatctgtcctccccactccaggacagctttaaaggttgatggttgctcttgatggtatggcagggagaatgtcccacaccacctgtcccttggcaccccggggcacgtcggggacgggaggggcaggggctgctgcccactgccagccgaatggcatgatgaatggagctgtccctcttccccacggagcctttgatctccccctcgtggggagggggccaggggcatcaaagacatttttgtggcattagaaaatctgataaacgccatctcacctgcagctggctctcccaccccttctacccgggccaggttgggggaggaactcgaggcagggactcttggacacgcgaggccgggctaaagcgaattctgacccctcgatctcttgaaagtctgcgacctccattctcccgctcgcttacaagtgccagcgcttgcgcgcacgccctggagcggctactcttgccctctcatttcccccacctccccgccctagaacgcgggcttgagaggtgggatggctgggggagcgagagcggaggcccagggcttcctcccttcttcaaggagaggctgacgaaggggcatgaggcatcgaacagggacacggaaagagatgacccctccagcatccgcctgtcgggcggtccagtttgacaaccctcgccgaagcaccccgcgccccaggccaacttcctctcttgcctccgcgccagcatctccctccgcaccgccccccgccccaaactccctcattcctgggaagttttctctctttacagtcaacaaacctgtcaaacgtctcccttccagcccgtcccccattcctcagctcctctttctcccccctcacccctctctactcttcttcccagcccttccttgcccccgactccaggcggccgcgagcggcggggggctccaagtccgagagaggcgaggcgagggggcgaagcgggcgggtcccacagcccgaagcgcgctggggccccgccccggcaccccgctcccgccctccgctgcgctccgcgccagccgccccggggcgcacggctcgctcccgagagtcccgctgcctgactgtcgcaactgccacctccctccggccccctgccccccgcccccgcctcggccccgctcccctcccacctccgcccccggctctgatttcttctcccgagcgagctccgcaggagacacaggcgctggctgccccgtccgctctccgcctccgccgcgccctcctcgcccgggatgggcccccccgccgccgccggatccctcgcctcccggccgccgccgttgcgctcgccgcgctcgcactgaagcccgggccctcgcgcgccgcggttcgccccgcagcctcgccccctgcccacccgggcggccgtagggcggtcacgatgctgccgcccttaccctcccgcctcgggctgctgctgctgctgctcctgtgcccggcgcacgtcggcggactgtggtggtgagtccggctgtcctggcgcggctctggaccctggagggtggggaccccgggacccaggacagactggggtgttccgcagcctcccggctctacctgctctccgagcccagctttctggcctcggccgggggcgtttctgaactccacttcgacgttcctaaccctcgggaacattctattgtgtttcctcctcccgggttctctcccaccccccgccaagttatgcgctcacccagctcaccaaggaacaggcgagtgggtaggaaagatctttcgggaagacacatatccgaggaaaagaatgtgtgaggagggccctggattcagggtatggggctggatttggagaagacaggaacaaggtgggaagccacaaggcagagagggccacacagctgccccttccccgccctgctttgcctaccaacccaccggcttctctctgggctcctgaggagtgggccttagtgacgacagagggaatataaaggggaaagtgagtcaggaccctggttttctctacctcgtcctccccaagcaaggaaaaggaggagcggaaggaaccggacccaggcgcccggcccttccagacctgggggtcatgaatgaaaaaatatgtgcagcccgggagatacgggaccgggaggggtcctgcgggaagggagaggggcctggccagccaagggaagggggcgtcttcccaggcttggccctagctagaagggacacctaggcagcgaaggttgcgggagcttcgagccttgggggtgggggtggggccggggcggggaaggagggtgcccgaccgggacggctcagagatccagatccaaaggacttttttccccctaggtctccagagccgcaaaccctcgcccggaatagctcagtgtttagagaggagagacttggacaataacgctgacgggttagccaatcctaagaaggcagggtcgtgtctatttgcatattgccatgtgattggctggatgccgaccctccgctcctccctcgccccccagatttggaagagaggcagatccccgtgctctggagagatagggagtaggatgcccacacagggagtggcgggcagcaatccctactccgtgatgcggagagccgtccgacgctagtgtcacggaaagggcgaaccgaggacgacccaggtcctatctagggaacatatgccctttgatccggcttagtataatgcagtggcagctttgaagcagatagatctaagatctaaacattatgtttgtgatcttgggctagtcacttcctttccctacctctcagtcttaactggaaataggataacagtctccctacctggcaggcttgctgggaaggttaggtgggaggacgtgtagaataataggaccttaggaggtactcagtatgtacagcgcccccctcacaacccagcttctcctggccagggtccccaggagtgaaaaaggggattcatttacatttaaaatccagagttccaaggaaaatgttgtaaaggaatctcttttccccataaacgcctaactttgccctttttcaaggtgtggggatggggtccctccctgatggccattgtcttccttcccctccctccccctctgtctaaatcattcttatccttacggttaaaataccatttcctccctgaagctgcccccttgtcctccttccattgccttctctgcgctcccactgtatcacatacattgggcaactatgctggttactgcatttggctgacaacagtcctttaggtctctcttccctgctcctggaaggcagataccttgtctttaggagccctgaggcctaggagtgtgttggtgctggagatgggcttgcagagtgtcattggactggctgattcacctttctgggctctgtatctgtggggcttcctttgttcaggaaggactgctgggtggcagccaagccaaaggagagtggcctggtccctgagagactgaccctgaagctgggaagaagggagtgggggaggaggtgacacgggcaggtgtgggagaacacagaggccttcatggccacagctgcagggcgtgccgggtgaggagtgaggggtcccagtgataacgtgtctgactgccttgctcagatgtgcctctgagggaatgagcctctcctccctgccttggccccttcactctcctttgtctattcattttgtttttctttctttatttctatttttatttatttatttatttagagcagagtctcgttctgtcgcccaggctggagtgcagtggtgcgatcttggctcatggcaacctctgtctccccggttcaagtgattctcctgcttcagcttcccaagtagctgggactacaggcacccaccaccatgcctggctagtttttgaatttttagtagaggtttcaccatgtttagtagaggtttcaccaggtttcaacaaggtttcaccgtgttggtcaggctggtctcaaactcctgacctcaagtgatctgcccgcctcggcctcccaaagtgctgggattacaggcccagccattaccatggcattaccatgcccagcctattttactttttattttttatttttttgagacggagtctcgttgtgtcgcccaggctggagtgcagtggtgcaatattggctcactacaacctccacctcccggctcaaatgattctcctgcctcagcctcctgagtaactgggattagagttgcccaccaccatgcccagctaaattttgtatgtttagtagagacgaggtttcaccatgttggtcaggctggtctcaaactcctgacctcaagcaatctgctcaccttggcctcccaaagtgctgggcttacaggcatgagccattgtgcctggtcacttgtctatttctgacacttcatctctttggtctgagcccagatccccttcccctggatctttgactctgcttacactcctgagctctccccaccctaccagtgccctccaagatcaagtttgggttgatgagctggaccaataattcccactggcctgaggctcttccagtcccctaaatccccagtctcacttcagctggcagctttcccagtaagggcttccaggctgttccccgatgcccaggacctgctttccctggccttcttctccctacttgtcagagaatcctggccaggtcagagctccagtgctggccaggaaagcagctgcagcagcctcctgcatcccactctgacattctagcagcagccaggctagaagcagagaggaccccaggacctttgagtgactcgactgtcttggtcaggaaagaggctcatgcccttggaattggctcggagacctggctccaggttcctgagaagtttctctcccaccttctttttcacttcccttccttactccaatgtgatgcatgctttctaaactctgtctccagctcaggcacagaggctcactcctgaaatcccaccactttggaaggctgaggtgggcggatcacttgaggtcaggagttcgagaccagtttggccaacatggtgaaaccctgtctctactaaaaatacaaaaattagccaggagtggtggcaggtgcctgtaatcccagctacttgggaggctgaggcagaagaatcactcgaacctgggaggctgaggttgcagtgaaccgagatccatgccactgcactccagcctgggtgacagagcaagactctgtctcaatcaatcaatcaataaaaataaactcttcccctagcctctctgtctttctctcatttgtaatcatatctttgtgaattacagaatcccagattcaaggacattggccaggctctctggaaatcatcttgtccagcctcattgcatccaggtcatccagcctatcctgtggccctgacagaccctgtcttgggagtgaggcagagagggagagcttcccagtcaccagttccccacttccgctctgctccttgctccggccttgcccacccccaggaagttctttacaacatctgacccatcattatttatacctccaatcggtggatgtagtaaagagctcactctcatagaatggtcaaatcaatctccttcttctctcttcctctttcctctgtttttttcttttcttttctttttttcctttttgagacagagtctcgctctgtcacccaggctggagtgcagtggtgcaatctcagctcactgcaacctctgccacccgggttcaagtgattctcctacctcagcctcctgattagccgggattacaggtgcctggcaccatgccagctaattttttttttttagtatttttagtagagatggggtttcaccatgttggccaggctgatctcgaactcctgacttaaagtcatctgcgtgcctcagcttcccaaagtgctgggataacaggcgtgagccaccgcgcccagccctgttttatattttctatgaaagaaactaaccctccccttgttccactagggaaaacaccacccagtgtcactcccttcccccatcccatcttgtctttcacccacccccctcctggaaaaggaaacaagagccagaggcctaggacagcctcatctggccccacagggaggcagggaaacgaccctggcttctttgtggcactcaggttttctagctgccacccccaacccaggctgggcctgaccaccctttcccatcctgtctttatctggggcccctgacccatcgtgggcagtcctgttgctggcccctgctgagctccagggtggggtgtgaaagggggtgggttggccatccattcccccctccaggcctcccgccttggcagcttcccctggagggatacaatggggctgtgagcagaaaagggcaggggcagaaggaggctggcccaatccaggccagagcatgccctgagcccaccagagttctggcactgagacatttcctggggggtgcagccccctcctgccctgttctcatcagaagccaggagttggtggggagaggtcagcaggaggtttgctcatcaggcccagcaagcgggggttccagaatgtgcactatgatggagaaatgccactgtggaggggatgaggcgagggcagtgtggtcaggctggcaggagggtggccgcagacgcctgtcctttgtgggtcagtgaaagcacccccagcctgcaccctccttcctgcctaggccaggcactccctcgggtgcttctccagaactgccggaggaggagctgagggagagaaagggctctgggaggcttctccaccttggcctctttggctggttcctccagttcctgagccctctgtttaatctagaaagtagatctagaaagcacttacagataatcaggtccaatattttcacttacatgtgagggcagcaaggtcacagacaggcggtgagaagatgacttgcccctggccacccggaatgcaggcagctcagagccagactgagagtccacctctggctcagtgcctcattcttgtgaggaggtgggggatcaggaaaggggcacaggatctcccacaggcctctcctgctcccctgtcccaccctcagataggtgctccccaccccaatatgggcgagcagagggcccaggacagtctcctgggggcacctttgcctgccgcagccctgaccaataggaagcccttttgtacagcgaagtctgtcagggaagggaatgcctccacctctcccaagagtgatgaggagagatggtgaggaagggcagagggaaccaagttgggttaggggtggtgaggtggggaatggggtggctgggggggcagtggggaggcaggggttaatggagctgggcatcactggctttgatgtggtggtttgggtgggggtaggggctgggggaggggagcagtaattaccgagttagacagagcaggacaggacaggcgggcgggcacaggcccggcccagccgcctcagcagcagtcaggcaacatttttctgccccttctccaccacccacctcccccacccctgtgcaacccccacccacagccccagggctcagggctccctctgctggcttgtgggaggtggggtcagtgtggggaccttgggagtaggggtggggaaatagagggaggctggcttggagacccttcagagggcgttgggtagccagtgggctgtgatccctttggcctcagtgatccacccaggagtgcctgctggggaagaggagggtcctagagggtgcatttggtccaggagcagggctggatggaggaggaggagacacagggatccaggctgagaagaaatagcagagagttggagaaaagggtgttctcaggaatccacaatgctgcctgcaccctactgtttgtcctgaactgggcaggctcaagagatgaataagggtgtggtgggaagacaaacaccagttgttggaggaagcccactctctggacaggttctctgcatctgtaatctgggagggaggtgggtattactagtttcatttgacagttgaagaaactgaggctcaggaggttaagtctcatcatccatctaatgaagactaagtgccagcttcacatgctagggactcactcaacatcatagaacaagcaaatggcagagcccagatccaaactcaagtctggtggatcccaaaaaccctgagcgtactccatgaatgtccatgcatgagcttattgtcttcgatgagttttctacctagttagaaagataagacaagcaaacatgaaaaattaattataccactggcaggataacagacgcccccaaatgagaggcgccccgggtgatgcatggaggaaggtctgtggggactggggcccagggaggctccttagggcaagtgggatctgaggtgagtttggagagatgctaagattttgatgacttagggtgggtctgaatccagaattttagcgatgttatctggaatagattcagagttaatcaaccttgctaggggtacggggctgtgtggaggatggtgtgggaggccactggaagtcttctgatatctcacgtgcccatttccctccagcactgtttatgtttgaaatattcatctactgtgtcttgcaatagggatccctccaccagtggccagagtcagtcgcctcctgtcttgctcatctgcataacgagggtgaagtgggtggggctgaactgggtgatctctgacattgttcttggccctctgactcaagagatggaaaggtaggttaggccagaaacctaggacatccagggcttaggtctacacatattgccaatagggactggctggcccctgataccacctccctaggcaattgatcctaccaaccatggtccttggtagagagaccttggcgcaggccaagccggttagaatgaccatccattgccttgtcccttcttgtccgcatactgatttcttttagggctagcctcatttttttctatgcccaggaatggctgtttgatgaggatcccagatcctatatattgtgtattccctactaccactgtgcttcaggccccaaaacatgcaaattctcccaaaggagcacatcttctctgggctgatcctaggccaatgctgacccaaaggcctgaaaagcagagttcactccctaaggaagcataaagcgaggaaggtgaaaggtgagtggggatgggggagttattacttgatgtgttgtcaaaagccaaagttatagggggtacgtgagtctctcatgctaactcctcagtttttctgaagcccacaaaggggaatgacttgatcagagtggctcagcccacacagagttgacagaaaccagagatcggaagcgaagcttggtgttttgcccaatgccccctgccacgccccttctggagtttcatttcctatgtatttaggatgggagcaaggacaggagggcagggaacaaactggtcccttgggattctagctgctactactgcccatccctccccctgaccagcttgtaaacaagtctagttcccaggcagccagccagcctggggagccagacccagaccaggaactggctctggggcagtcccccagccccagccctacctcctgaaagtccctggcctccatactcctcgtgattctcccgtctctagtccctgcgaaacagagaaggtcaagaggtttttgtctttctgtcttgctcatctccactccctcctgccttcttaagggaggaggagggagaggagaaggatggggcagagtaaccttgggaagataaggccaggcaaccctgggaaactagggagttagcagagggcagggttgaggaggagggactggggaacttagaagtaagggaagtgggggtggggaagatgagcttgcagagcccccgactcacaggtggagccccagacataaggggctggacgactgcagagaggactcattccctgcctgattcccagtgggggaaaagagcatgtttgaggaaatgaattaggagtcatgaaataagatgtggacaggggcctgggctcaagtgagaactttctcttagatggcttatttactcattcaaaaccacatattagatggtgttcattgtataatatactacaggtattacatgtgacacagaattcatactatgcaattttttgtaatgaaaattggggttgggggaggatataaactaagtacctaagtcttccaggagatgcaaaggaaaataaggcagtcttaatgctcaagaagctcatagtcttatctcctgaccctgcacagccatgttggaagctgcctccaatccttcttataatgaggtgggatatatgggcagaggagggacagatagattgatggatcaatagagaccgatcagctctcaaaagtcactgggtcattggggtgccctgacccaccctccattgctttacttatctaggctgggaaagggtgggggccagtgctgggctggtcttaagcacgcaggaaggaagatgtggactgtggcctctccattgagagacatctgattcctgagctacttgggtacggatgacggcagcaacttgattttgtgtgtgtgcgtgcgcatgcgtgcacgcatgagaatgcacgtgcacacacacgtgtttgtgttgtagaccataaaggactgagcttactacacatcttcctgtaccacctcttcaagcatctccatccttagtgttgagagttctaccttaagacctaaattcctcttgcttctatttaagaccatcacatttcattgttgtggagccagaacattcctgggcagcctgtacttgtggagcaaatggggacagtggggcggatatgcactaaagcaaaactgaaaagtaggccaccttgacctctggcaccacctaccaccattctctatgttttctctctcctgggacccctacccccaccctgtcctctgctgaagagcttttgggtggtctctaattaccctctgctcccagatgctctactcattcatttgagatgggaatcccagctaagtgttcaaataggagcattctgatgagagcagttcccccaggtatgaatccctaaggaattaaccttcaggggtctggtataccaaaaccaaatgtcagctctctccttgggcagaacgaaggccaggagttgagggatttctggaagtgcgtgagacttcccgtgaagtcttcccctaccaagccaaatattgcctgcacccagcagtgatgtcaccctaatgcgcagggcttggttcactgccattctgctcagagaaggcaacagatccttggccatgtgtggtggctcatgcctgtaatcccagcactttgggaagccgaggcaggcagatcacctgaagtcaggagtttgagaccagcttggccaacatggtgaaacttgtctctactaaaagtacaaaaaaattagccaggcctggtggtgcacacctgtagtcctagctatttgggaggctgaggcatgagaatcgcttgaacctgggcagtggaggttgcagtgagctgggagcccgccactgcactccagcctgggtgacagagcaagactccatctcaattaaaaaaaaaaaaaaaaagaacgaaaaccacagatcctggagcaagagaagggtcagtgtcacctactttccaacaatgcttcagagacctggcccccagctccttcttcctgctctccagttcagggacatagaagatatcagggtaggagggcccaccttagagatgaaagcccaacacacccattttatagaaggagaaacctgggctatggagagggtgtgacttttctcagctaggctccattccctagccgttccaacatctcgtggcattctctctccctgggattgttcttgcctttcatccgggctgttcagctgacacatatccagcttgtggtccactaggaccatatcattccttgatactgcttacttttctttggtgtctcttgacgacacatgaatttccttgacggccttcttgatctttcttctgttatttcttttccttgtcacccttttgggctagaagtttgagttttaactttgacttacctgatgccagctgccttcaccttgagtaaaatttctataagaatttatttacaaagatgtgtgcaggaagataagattgaatctttgctctgtagcaattatcagactagactctagttagaggggacacagacatggactagcaggagagccagacaggacaatctcaagctcagtttggaggtagggtgggagggcatgtcacagctcccgctgcgggctgagtggggctggtcctcctcccttccaccccaagcccttttttgggttacacccctgacctgctattctctgctttccagggctgtgggcagccccttggttatggaccctaccagcatctgcaggaaggcacggcggctggccgggcggcaggccgagttgtgccaggctgagccggaagtggtggcagagctagctcggggcgcccggctcggggtgcgagagtgccagttccagttccgcttccgccgctggaattgctccagccacagcaaggcctttggacgcatcctgcaacagggtcagtgtggggagggggcggaagtggggctgctttctccctgctgtgggacccgaggagaggagaactggttcgctgaagttgcctgagccccacttccccctcacatgtgtctgggcaccctgcaaggaccctgcctcccaggcccctggggcagccctcccgccgcaggtttcaggtcccaggccccagctgaccgccccagcccgcgctgattgcacctgtctgcattcacagacattcgggagacggccttcgtgttcgccatcactgcggccggcgccagccacgccgtcacgcaggcctgttctatgggcgagctgctgcagtgcggctgccaggcgccccgcgggcgggcccctccccggccctccggcctgcccggcacccccggaccccctggccccgcgggctccccggaaggcagcgccgcctgggagtggggaggctgcggcgacgacgtggacttcggggacgagaagtcgaggctctttatggacgcgcggcacaagcggggacgcggagacatccgcgcgttggtgcaactgcacaacaacgaggcgggcaggctggtgcgtacgggcaggatggagtgagtgtgtgcggaaatgtgagtgtgcgcgcaggagtgtgcttgaggaagtgttggcaggagtgagggtgtgtaggtggaggggggcgttaatgtgtgggggagtgcgcacgggcggaaagatgggctgcaagcatggatggacatgtgggaggagaggtgtccagcctccaagaaggagtcacgtgggggtctgagaaggccagatgctggacggtacagcgggcagaatgggggaagggacactcagggaataggactgagggtctttagtgaccccaggcagagagggcacagcttcaagacaggacaggtgaagcaaagcttgcagtgggtaggaggtctggatgcctaggcaggggcaggagaataaaacaaaggtggggatgaaagacaggatagaagctaatgcaaggtctggggttttggtacagggaagccagggggagtgagagaggcctagaaagagttagaacaggtctgaggggcaatggaaaagagcgaaggacaaggaaccaatcctagtggaggttggagggagtcaggtggaggccaggacagctgtgaccaattctgggcatttgccaactggctgcccagcaacaccagcccaggtctcacctgcccagagccatggcagcctctcctctcccctctgtaacgaggagagccccaggagctctcattcaggggcaagaaggttgtctgggtgtgatggttccaggagggggcagggcagactcaggaggtgggagtgggacacatggtcaggttagcccctggactctgagcttccagaaatgattttcttgggtcttctgaaccatcagcgcttggtgggtttgggaatcttagaccctgcttcagacagtgactaggggagaggccgcctgggttccactctcagtactgcattcccagcgggccctcctgcaccccatgcctccgttctagcgttctccagggacatcgccatacataccgtgtcctctagggttcgggcctgaggcatcgggcagggggaggagggggcctgaagaggaatgtccggacaggcccacatacctgccgagagggttggggaggggtgacggagacagatgcccaggaggctggctctgcgtctgtgctcagcccggcctgggggccgtgaggggtaggaatgagggggccaggtaggcaggagagctagacttcgacagctgccacctctcccctcctccaaagagaatctcacccctgctgtccattctgctttctcccccaccccctgcctttggaccctggaatctctgcgctgcatattgtccccgtctcccctcttcgtcatcatcatattcctccatcctcaccattcctcctgctcctcccctccgagttgtcctttccttgatttcctccccctgaacttgcggtctccttttgtctgcattttcctctcttcctttcacctcccattcccaatcttattttctgtccatccgctgggcccttccctgcaccccctacctgtccacatgcgtccgcccctctgcctcccgcaggccgtgcggagccacacgcgcaccgagtgcaaatgccacgggctgtcgggatcatgcgcgctgcgcacctgctggcagaagctgcctccatttcgcgaggtgggcgcgcggctgctggagcgcttccacggcgcctcacgcgtcatgggcaccaacgacggcaaggccctgctgcccgccgtccgcacgctcaagccgccgggccgagcggacctcctctacgccgccgattcgcccgacttctgcgcccccaaccgacgcaccggctcccccggcacgcgcggtcgcgcctgcaatagcagcgccccggacctcagcggctgcgacctgctgtgctgcggccgcgggcaccgccaggagagcgtgcagctcgaagagaactgcctgtgccgcttccactggtgctgcgtagtacagtgccaccgctgccgtgtgcgcaaggagctcagcctctgcctgtgacccgccgcccggccgctagactgacttcgcgcagcggtggctcgcacctgtgggacctcagggcaccggcaccgggcgcctctcgccgctcgagcccagcctctccctgccaaagcccaactcccagggctctggaaatggtgaggcgaggggcttgagaggaacgcccacccacgaaggcccagggcgccagacggccccgaaaaggcgctcggggagcgtttaaaggacactgtacaggccctccctccccttggcctctaggaggaaacagttttttagactggaaaaaagccagtctaaaggcctctggatactgggctccccagaactgctggccacaggatggtgggtgaggttagtatcaataaagatatttaaaccaccagggctggacccacagttttgggggagactgatcttcaggctgccaggctccagaagaaggtggttttgctagaactagcacctcaggggctatcacctgggtccctatctcccgaccaggttggcctctcctggaaactcgctatctccccttggcattcttcttgttcactcctgtcacacatctaggtcctggatctgcaagctggagaagaactagcaattcctctttaaagggacaggggcatcagaagcttctgatgcatacctcttgacacccaacaatatttccttccttctggttcctcttgggaagctactggtgaaagtgaggagacagagggcagttctggattctccagagctgaagcttgagctctcatcttcctccagagagaaagagggatggcatagcccaacttccaggacccagagcctccaactttcctccagtccaaatactgcaatggggaatgactcccccatcaaggtatggaggacaaaaaatgagctttggggtcagacactctgggtttgcagttggtgctgctgcttagaactttacaacagaggccaaattagcctcattttctttatacaaagggatttcgctctgtttcagttatccattgctacataacaaacaaccccaaagtaatcacttctcaggatttttgaggtcatgattggtcagaactcagcttggtaggtctgctctatatagcagaaccattggcttgggttcacatggctgcattctgctggagtctccactgtgctgtgctggacagtccaagaagcccccactcacatgtctagggcacagagcttctcttgtgctctcattctctccatgtggctaacctgggcttcctcgctgcatgttagccttaggatagtcagacttcttacataagactgactttctttttttttttttttttttttttttttttttttttttttttttttttgagatggagtctcgctctgttgcccaggctggagtgcagtgacgtgatctcagctcactgcaagttctgcctcctgggttcatgccattctcctgcctcagcctcccaagtagctgggactacaggcgcccaccaccacacttggatacgtttttttgtatttttagtagagatggggtttcaccgtgttagccaagacggtcttgatctcctgacctcgtgatccgcctgccttggcctcccaaagtgctgggattacaggcgtgagccaccgcgcccggccaaaactgactttcaaaggaaagtgtaccaaacttgaaggcagaagctgtaagtatcttctcaagtccagctttggaagttacatagcatcactgtaactgtgtattggtcaaaacagttcacagagccaggcaaaattcaaagggagggaaaattaattccacctctcaatgggaggagtggcaaataatttgcagccatcataatctgtcccacaccctcacaggattgttgggagaatttt

SEQ ID NO: 672 - DNA, 50759 bp, Homo sapiens
  source 1..50759: mol_type = genomic DNA
gggccacagggagctcccactgacctactttcacccactaactcctcacagtctatggaagagtaacacagtgggtctcagaaacacatacagtgttcacaagtgctttacagaagacacagagcaagcagagatggtctctgtggcaaggctggcaagaagctcaattgctgcaaaagttattaactctgggttggggtagagggcaatggactttttaccatttttcagagctgacctgtgaggatggctagatactgcaagaggatgcctggaggagggagaggtaaaagaaatgagccagtaatttcttgggtaatagttttcctagataatgtttatgagcatttgctatgtacttgatgttttcatacttaaaaaaaattaaacctcactatgatcctatcaggcagggacttttgtccccacttcacagataaagaaactggagatttagaatttgaagccaggttggtctgctttccatagcccatgatcttaactgcaagctaaacttacagggtcgtctgagaatctctgttcttccctgtgcagttgaaacaatcaatgtggctgtacttttgttgtaagacctggctctttccgactcgctgacgtttgccatgcttgtcctgagcttctccagagaaatgctgtcttctggcaggaaaagataaaaacggctgatataaatgagtcaccacactcgctataattaacagtgatgcaagagccagatgcaaaataagaggggcctctggacctgacttttaggctgcccaaactttgagctgcacttcaatgtaaaacagtctccatagctaggcttccatctgtttgagacgcattttaaatgaagaaataaaacccggaatgcatgcaagccccaagataatggagctgagaggggctgcaccaaattaatctccttatttacaattcaaaaaccatacaccagaacagaaagagagtttatagtttatagataatatagatctttgctttcacactcagttgccctggaaaggctgagcagttttcaatctgctgagctgatttatagcaagtacagctgtaaattcaattgtactaggtgttcagcctatgccctcccagtgatgtatctgaacttttcaaaaggactagttgtcattaacatctctctattttcttttgctgatctgggatgatgggatgcaatgacaatctgcttaaaataaaccttaaaaccttaaaacataatcaccacatcatccacaaaccccattcaaccacagcatgagcacaatcactctgtaacacaaggtgaagatattctctgttgcttctaggacatataagtccctcctgaagtttgacagagagaaataaattgtggtcaggacctggataggctcactagtagccgtcgatgtcggtggcgtcttctcttacctgtttaaaagaggctcagtggccttgagatttgaacacaatacagctgatggaatcttgccactttccttttgaatagactttaattgagagcaaagtgaaaaatgcaggttacaattttaagtgttatcatcaatatcttgtaagatcaacacccagtgatgcatctagtacttatacagtcctaattttagttgtcaaagagcaaatcattatcagacatatatttacacagtaatttcaagcaacggtaaataataaattccctcccttaaaaaacaaaacacaacacaacacacacacacacacacacacacacacacacacgaccatctttaaacaatggatttcctcacccagtaagtctcatttttttcacatatacttgtagacccaaaggtccttaagttacttaaaaacagtcttatcagtggagatcctggaccatcccctattttcttttaaagtcactttcatttttacaacttgaagccatataccagcatggtttttatacactaaggacactcccagtgatgaaaatgaattcccctccatttgtgcaaggaggtatgtacatctataaagacacatatgattaccactcaaaagagtcaaaaacatacacaaaaaaatctcagatcttcatagtttcttaagagcagtgtgccagtgttcacattgaattaactgaatggtaaaattcttttagatttctatacagaggtactggttagttctgattttttcttcagctgcttgaaatgcatgagctttaaaagttgcctggcagaactacatcctgctttccaggttagcagcctggctgacctcgggaatgttagacaagattcacccccgatgccttgctctctgatttatttcttgctgttgctgttagtaaatggaaaccatgacaaagtttacattagcagacacatacacatgccctggcctataaatattccatgatagaaaatggtacaataattccatccccagcgaaaacgagcataaaaaaagaagggaagggtcagggggacatgatcagctatggctcttcttacagtagaaaatccacaccaaatggcaatgggcttttaactaaccagacattgttagctgcttctccagggcctgtgagtcaactaaaagtaggcagggcagagaccaactcttccaggcacacctggtagtttccagaagcaccggtatcttgtcttggaagttggatgaagaagatcaactgaagtttcctttttagtgaggaggagtggagagtcagacttgaaagcagttcacacactgtgctgcctgggacactgaacggtccccgagggagacccctcaaagcgccagctggagtttggtcatgtttctctgatgcatgttgtgatggcggactaattcatctgaccgggcaaactttttctgacaacttggccaccgacagctgaagggcttttcacctgttgacacaattgccagtcagagacacttgcaacaaagagacaggcacaagttcaactatcaaggcccgagtgaagtcatcacaaggcacccactctgaatttcccatcattctgtccctgagctaaccaactgagctcatttcccaggcagccttgaaacagcagcacctcttggggctttaaggatcgaaatattgtaaaaagttatattcttaggtcagaaaacttggaaagtgggagataaagaatgagtcaagttgggggaaatgtctgagcaattcataattaaggggaaaaacgtttgtttcagtctctgctgatagaatgttttgtgaactgtgtaaatttctcccccttgttgagtaagttgggaactgagatgaactgggctgcagaagcctctgggtcatctaccctgggtattactgagtgatcactgtccagggatctcagctgtgactgaagcttttaacacttctatctgtgtagataccctggatgggctggatactttaaaataaatcactgataccagtttacatgttatgtgttgtttttttttttctcttaaagtgttactgagagcataatcctgttatatggaagattctagttggggcgtggttcttagatttttaataagcttgccaaaagattgaggcttctccacccaaagagccctcagacattctttccaagcctcattctcattagggagaataactaccatttatttgatgcttaacatatgccaagccttgtgctgggcttcacacacgcacacacacaacctcatgtactccttacaactgcccgtaggggaagcgttattatccccactctacagatgaggtaggacatctattgagggcagatccaggcagaactcaaatctccaggtctgtcgaattccagagcccgtgctcttccctgtatcacacctcccaggcctagccatgatggaaaagcagctgcagctccatcttaaggaagaatgcacagaagctaaaccctgtgccacctgacggatcttctcagatactgctggtcccacttggccttctctgagaactactggtttggacaagcactgagaaatgtcccaggagggctggtgtcccagggtcagactggaggccaatcaaatgtggtattaaacagtctgctggcaaaacaggtcatgtcacacttacttggggagtgtgacagccgtgtcaaagggactataacactttgccaccgaattatgagctcaggactaagttaaagaagcatcaaaggcacctgaggaagggaagcaagatcccatcctgccaaccatgggccacaggtgccttggctctgtttttaaatgcagccaatttgggcgaagaatctggggctgctcaggggtttgtgatgtcatgttttccttcactcgctgttcctctgctcttcctggcctggctctcactctccaaccccacctccagcagtgctgttaagggctggctcctaatggactaatcccaaccctgtctcttgtcatcttcattcctctcagtctctcagtggtgttcagctttgctgactttgattctctacttgactctccatgctccctggactgcagagtaaatatctgccccttctccaataaagaagcaagtgggacaaggtgggctggaagcagacagaactggatttgctccttactagctttgtgactttagataagccattgaattattattgcctcagtctcctcatctgtaagatgggaataaaacatgcctacctcatttttttttgtttgttttgttttgttttgttttgagacagggtcttgctctgttgcttgggttggagtacagtggtgggatcacagctcactgcagcctcagcctcccaagcaaggtctagtgagcgtcctacctcagcctcccccaaatagctgggactataggtccacaccaccatgcccagctagtttttgtattttttgtagagacagggttttgccatgttgcccaggctagtcttgaactcctgggctcaagtgatccacccacctcatcccaaatagctgggattacaggcatgagccaccacagccggtcctaccttactctacttacaagcatgttgtgaagatagacttagataagctaaatattaacgctctttccaaaggtagaaaatatgcaacaaaggtggtgctatttttattatgaatcacaccagccttgcagaaagcaaaaaccttcagcagccagtaaatgaatgccctattctcctctctgtactagtatgaaggaaataatatccacacactgatactggtccagcagaaaccaagaccgctcctggtgcattaacttttaacagagcaaggactcagttctctgaaaatagtgccattaaacatgtgctctcagaagaataaatatttggcttgctagaatttctgctgcttttctgtaaagttgattatcgtatcaaagagagtaacaaaatgtgtgatgcaacaaactggaaacagtagggacctggcttatctcttcattttcattctgcacactccagccattcttttcccatctttctccttctctgtatttccaccctccccttctttaaaaaatgttattatttattatttaaagatagccacgcactattccttctctcaactgagtctaaaccttagaacttttacactagtcttttccaatccctctcatcacaatttcattccacaatagtttaaaaaaataatgaaaaataaatgtgaagaaaagtttacgcacttgttttacctgtatgagtcctggtgtgggtcttcaggtggtcggaccgggagaactttcgctgacaagttttacactggaatggtttcacacctaaatggacagagaaggtctagcctcggccctaacaatgtgggcacagtgaggcccacaaggctgacttccggcagctggaggagcccagcatttcctgccatgcctgcaatgtctgcatctgcctcacccttagatttccccagtcccccaggcccaacaagaatcactgattctgcacagtaatcttcaaggacctgcttctgtcttgggaacaaccattccttaaccacagaggtccagcttctcaccagctggaagatctcagctgtgtcagagacaggaaaagtgaatcacacgctacaaattggattccgctctccatcaccctcattctttgctgatgctcagtgtatcatcagcccactgctagtgggatctcactgttctgtggtttgcaggggaaatgtggggtgtttccttttctttctttttctttatttaagaggaggaacatctccagagattatggggggaaaatactggaaaaactaaacacatggctgactctctcattcatattcaacaacaaagagaatcatgaaatcaaccctagcccaagggaacacagctgccagcaatgagaagtgaacctacaaacctgtatgtctcctttggtgtcttttgagctggtctgaacgagaaaaccttcgttcacagtccttgaagtcacactggtatggtttctcaccttggggaagacacatattctatttgaaaatgatactggaaaaggggatctcattaaaggcaacctctcctactaggactgaacagatcccaaaatgcctaaggcacttcgctggagcttgttagggtaggatgatccccaacttgcaagttacaaatgaatgggagctcaggggccagaggattctgccccaaggctcacatctagctctgccattaaaaaaaaaaaaaaagccctgggtgaggtgtggtttctttattgtaaaatgggtccaataatccaacaactttaaaggatttatgaccttcacataaagggctcagcccagagcctggcatagaaggcgtgctcaaaaactattagcaaataaaaaacaaaatctttaactcccaggcagaatctgaggcagaattctgggatgcatgtgccttgaggtcaacctcatgaaataagagttttatgttttagggcccaaagatctggtgttctttgctactgactccttgttcttgcatcaagcaaatatgactccatggttgtgagaccctcaaaacacaccaaaagcactgagaaagtttttggtgtgctttatccaagagaagtcagtagtgggattacccaacctcctgtctcagaatggagaagcctcacccctgtcctcactagagaaagttcagccaaatactgggacctgagccccaagagaagtgagcaaccccaggccttcccaccttcttaggagaatcctgagtcacaggcatctgggatggaaacaagccattctagaatcagtcaggtctttctgttgcaaaggcagccccctgttacctttccaatctcaaagcctgggctatttccctcatgaatctctattccccactatgccagagctcacatcctgaagtcctccttgcactctgctcacactaaatgtcccccatccctatctccacatcgaaaagtctcctgggtgtctccttcttctgcaatgcctgcttggaaactgcatgggccaatttcccttccttccctcattacgacatttattccaggctgtctaatgtggtgagctgtgtctgggtctacaattctacaattcttcaatgggttggaaaatcctaagggctggagcctttttatttttattttttctcagagacagagtctctctctgttgcccagactaaagcgcagtggtgtgagcctagctcactgcagcctcgaaaccgtgggcacaagcaatcctcctacctcagcctcctgagtagctgggactacaggcatacaccagcacacttggctaaatttttaaaaatattttttttagagacagggtctcactatattgcccaggctggtcttgaaccccttaagcaatcctcccgcctacgcctcccaacatactgggattacaggtgtgagccactgcacctggcccctttctttgtatttgtatccaggttggtgccttatgtttcacctctgtgagctggagaagatgttacccctattgagtctgatttccttcccctgcctttgagcttctgctcatctatcactttctctgcccaaactaccagcctccactggctaacccaagctgttcttcctctgagaaactttctcggatgaccttagttcaaactgataccctccaaacccctcggtacctcctgtctctgatttagtacatgatcatgtactctctcagtcacttttcatttctttatatcctagctcccaaacaaaccaggaactctttgagaaggaggattataacctgcagttaaaaagaaggagtttgagtcctctttctgctatatcctatactcttcataaatgttttgtgagtgaggattaaatgaaatatacatgtagagagcctgacacccaaaaagtacttaatataacagtctgtactgttgttataaataaataagaaaatattgctctctttcaagggggactgtaggattgttaaataccaacctgccctcatcttctgcaaggaagagtttcttaaaggctccagtgggtctggggttttggctgtcttgttcactgccttcccttcacacagttgtctaaccctcactgcattctaagtgcttctctctcactaaaagtttctacaaccatattgccttcatttattcccttgcatttttcaggcaggactttactttctcgttttccttataaccttgacagtcacttttcaaatgatcccatttggggaaatgtgtaaaaacataacatgccactggtcccctcctttttagcctcaaagtctgtggcccactgagtgcaaactcagattgacaccagaattgcatcctctggacacagtgaattagcaaatttcaatggtccaaggaaatctgaatgcagctcacttttttctccagcttcccaagagcaaaatcagcagtaataacacagttgcaacagtgatcctataataatgctgttcttcgattgtggaaaaggcagcagtagctcctctgtaggaaaacctgggttttaccacactcccacactcccacctagtgcccacaaggcccagagtaaacgttctgtgacatggctgtccacattcaaggtggccaacaccaaacaatgccagttctctgtttcccagaagcagcctctctgacctgggggaaaatccagtttcattggcgtatcttcaaagataaaaaatcatcatctctctctctccttttttttttttttggcagagtcttgctctgtcgcccaggctggagtacagtggtaagatctcagctcactgcaacctctgcctcctaggttcaagcaattctcctgccccagcctcccaagtacaggtgcgtgccaccacacccggctcatttttgtatttttagtagagacggggtttcaccttgttggccaggctggtctccaactcctgaccttgggtgatccacccacttcggcctcccaaagtgctgggattacaggcgtgagcccccatgactgaccttttttttttaagtgatcactaaaaaatcaaactaacaatcaattttccccttcctgtctagttgattattactgacccaagcaggtaagtttttctttggaccatctcttctaaaatttcacaatgatcttgcccatcgacctcctaaaaccatctgatgactatattcccaggccagctcctctctccttagaaatgctaatagtattctaacaccaacacgattcctacacaggtctctttaattctgtggcactttctctctaccactctgctctgcctttctggaagacagtttactgacctctgtaataaaggatagataatcagaatgcaaaatggccccacagcctctttacaacacctggatcagacctttcaaagcagtgcttactttccatcctggaaataacctgggtccttagcagtgtgagagcctggaaaaggagctcttgaaccatgtttgcccaagactggacagcgggcacacttaccagtgtgcttcctgctgtgcatctgtaagtgggacagcttaaaatatctcttattgcagcctgggtaagcacacatgaaggggcgtttctcactggtctcagatgccgaccgtacaagagtcggggctactccaggcacacgtcgcacatcctgcaggcagagagtaagaggaagggaggctttaagccacatgtgaacattcacgtaggtcttgagggagagtgagcactggagtatatccaaagaaggggtggcaggtgcagacctaaaaccactcccattcacactccagatccccatggcagacatcagtaatggatgctagatcaggacattctacaatgcagtgctctaagatcatcactactgagcaaccagaagtggctgttgagatgaaacctacatgaaatggctgtcccagagcctctgcaaaagaaatgctggtacctggaagagctcccaatccattctatctctcagcttctcctcttgaggtagtgatgtctgcaagtccaaagtcccaaagtctaactactccctcccacttggagtcatgaccacatgacctagagccagtctgcaatgggtggggacatccttattagaaaaaagtgggataatgaatgagcccctaactgaccagatcgtccaagtataagtaaataacaaggaagaagaagcccctggatttggggatcccatctgtgaaaggaagcaaaacccaccagaaggccatggtgaagccagcacaacctttaatagtgaggccagaaagcactggaatccatctgccttctgtgctctgcacacgtcctttgcagggcatctgttgctcccctttatcttgtggaagtgcagtgtgtgtgttgtcagtcttccaagaataagaactggaggaaaacaaagaggcaagctccccttcctcttcttggggtcagggagtcataaatgggagctgagcaagtgcctgagtggccactaaattctcctcattcctttatagatgagtaaatcaaccccaaaggcggtgagatgctgacacaagagtgcatccatgttttggttttgtttgttcttaagacaggatcttattctgttgtccaggctggagtgcagtggcacgatcggggctcctgcagcctcgacctcaccagcttaagtaatcctcccacttcagcctcctgaacagctgggacaacaggtgagagtcatcatgcccagctaatttttttttttttttttggtagagatagggtctccctatgttgctcaggctggtctcaaactcttgagctgaagggatccttccaccttggcctcctagagtgctgggattacaggtgtgagccaccatgcctggcctaaagtgcatccatgttttgtgctaagacctggaaccacttctgaatataaccaactccttgccctgtgcattttccactctaccccatgcttatgttctagtccctatttcacattgccctgcactgaaaggtcattttcttttttggaagaataaatgctgcagtgacatacaacacaacattgatgttaataggccatagtgtctcagggataatgaaggcataaaattaaatggtgagccagctgttggattggaatactcaatacctgtctggtctggagtgttttagaggccatggcaagtgagcctgacaaactgggcttgatgggaaagaaagcaaaggaagcattttccatttcccttaattcatcctagaagcagtgcacatgggaacaggagttgttaatctcagtaagggtcccggtgaaggattctgattgtattcgtcaggggagaggcttgatgtctccctaaaccgtcgtcagatttccgtatttctgtaacccttgcctttattgctctccattgaaaggcttgggagtagggagcacactgttctttcttcgtgacacttctggaaacattaatcagaacatctcagagctacttgccccacgtatcatgtggggtctggcccagatacaacttatatctagagtactgaccattctggtgaaagtatcactgctgttactcaggttgcagccatggattgatgtttataagccataaatgaaacccttagtaactgtatgtgcttctgaccacccaaaacagagactctgcagggaaggcagactgaaggtctacggaggtggcagaccaaaagtgtctattgaattctccaaaacttttacctttatactttactttcttcatgctccttggagacttctccctcccacaaactgttcaccatcctctgcctccctaagaagcagtatcgtgaagtaggtataaacagggggtctgaagtcaggcaagacctgtgttattagtctcggctccaatatttactagcgatgtgattctgacattattcatcacctctgggcttcagtttccccatccatgaaatggagagaataacagtacccacctcataagtgtgtattgcagatgaaatgaagggggaaaggccacaaatagacaaggagaaaccttacatgcatattgctaagagaaagaagtcagcctgaaaatgctacatctagtatgattccaactatatgacattctgaaaaaagaccgagccgggcacagtggctcacgcctgtaatcccagcactttgggaggccgaggcgagtggatcaccaggtcaggagatcaagaccatcctggctaacactgtgaaaccccgtctctactaaaaatacaaaaaattagccaggcgtggtggtgggcacctgtagtcccagctactcgggaggctgaggcaggagaatggtgtgaaccctggaggcggagcttgcagtgagccaagatagcgccactgtactccagcctgggtgacagagcgagactcccatctcaaaaaaaaaaaaaagaaaaagaaaaaaaaaagaccggtgattattgggaagagaagaagagggagggaagaacaggtggagtgtagggaattttaagggcagtgaaactattctgtatgatactagaataataggtacatggcattatgcatttttcaaaacccatagaactgtacaacacaaaaagtgaaccctaatgtaaactatgggctttagttaacaataatttatcaatattggctcatcaattataacaaatgtaccacatcaatacaaaatggtactaatagggtaaagtccatttttctaaagtccatgtataaagcttagcacaatgcctagtatatagaaaatgtccagccataggcggtacagttagtatgatgatcatcaacacttggcaagatgtgagtctacctgtggacactttacgatgtagaccaaatcttagaagtcaaaggtccaagcggttaattcaagcccaattagcttaaatacaaaagctgcacagcccgccctggagaagtcaaatggagcagtaaaggcagaaaggagaggattctgttaggacgcatcttgcgcagcgtcaggcagcggggcagcctctctaggagaggacacagccgccttatcagacccaggggacgagcaggtgtccctgatgttaaaggagcctgcagtgaagaagaggctgccagggccaaagagtccatcagtaaggaactaaagggccggtaagtaggaagaggcagtgcggcccccttcccgctggggcctgtctgtgtgctcacctgaatgcctctgaagacaccgtgcgtgtgtattctgtattgggctccgcagaggatgggcgttgtgtggttatcgctctcgtaccctgtgctgtggctgcaaacacaaagaagggaaaaaggctcagtgtggctcacagtcgccatttggaaatgcttatctgcaatcaggagggaatgatggtttttaaagctcacagaacaaaaatagttggtttttgcctccctccatggggccactttagatgcagggttctgcggagggcgaggcccctggatcctggccgccacctcgcagcccctccctcatcctccgattctcgtaggcgtgcaccgtcacggtctaggtctcgctcagacaagccgaggaagaccacagtggcagggtttcatcctcggcaagttgtttaccatctagacggcagggctgacagctgcaggtatctcaggaatgagcagaatgcctcaagcttcacgttaagtgcactgaatttgtcggcacctcatgactcagtttttaccagatagcaccaaaaaagtgatgacgcaagaagagatgtcatgtcctcagaagtggggattacatatctgtggcctcactctgcttaaatgacaggtcagttttccagatcagcttaactcttggtagccagcctgtgctgtaggtgggcactgaagaatcttcctccagcattccactgactagtcccctaactggtgctcaggttaagcttcgactacataggaagagctgaaagatgtgcaatgctgaaaaggacaacttgaaaggaacgaatgttctgttctaaaattattctctccttcagatacaatgcctctatctgctctacagttattttacttccagatgagatgaggcagactgaggtttttcacccacaccagcagcacattagaattacacctagaagcaccgaggagagctcttatgaaatagctctgtgaaatgatgcagctgctttgcaaaatatctggcagttcctcaaaaggttagacataaagttaacatatgacccagaaatcccactcttagggatattcccaagggaaatgaaaacagacgtccacacaaaaacttgtatacattgtgcattagcagcatattcctaagagccaaaaagtagaatcaacccaaatgtccatcaactgatgaatagataaatcaaagagagtatcttcatacaatggaatattattcagcaatgaaaaggaataaagtaccaatacatgctacaatatggatgaacctttaaaataccgtgctaagaagccattcacagaagaccacatgtagtatgattgcatttctataaaatgtccagaataagcaaatctgtagggacagaaactagattagtggttgggtgccttgaactgggggagttgggaaggcaaagaaaatgactgctgaaaacgtcctaaaattgtggtaatggtcatacaactgtgaatatactaaaaaccattgcattgtacactctaaatcggtgaatcatacggtccgtgcaatctataaatctgcttttaaaaaattatcgggggggggtgtggtccgagaaggatgcatcagtatatttatttatttattttgagatggagtctcgctttatcacccaggctggagtgcagtggtgcgatcttggctcactgcaaccaccgcccctgggttcaaatgattctcctgcctcagcctccggagtagctgggattacaggcgcacgtcaccatacccggctcatttttgtacttttagtagagatggggtttcaccatgttggccaggccagtctcgaactcctggccttaaatgatccacccatctctgcctcccaaagtgcggggattacaggtgtgagctaccaggcccagccgcatcagcatttttaaaagcctccaggtgggattaaactggctgtcagcactgagaattccattctctgcctccattactctaacagttggttccaggggtcctgggcagggaggcaggtaagctggtgggtggatcagcccactccatctggtgtggtgtggggaagcctggagttgacccaatactcactcacccagaggagagagtgcctgaaggaaagagtgtctgccaggacaactgaaatgtccacaccccctagggccacagaagctgtagggtttcacatttacttctggctctaagcattttagaaagaactgcctgcccctctaacctaccatatcttgtctccacatccttcaagtaatttttgacttatctagggcagggggaatgtctcaaagaagtagccccagggtcaaacctgcaaaaattgggcaaaaatgccaaacccaaagaacatatgcccttctgacccttagaatgtgtttgtcaggagaaagaggctgtgtctgccttcctttcaattacttggtacagacagtgggaaagtgagaggtgatgacaatggccatttggcagcagaaagagggcagtaccagaatggtgccatggtgctgccagaacattttgcctcaaaggctgtgaagagaagctgcctttgcttgcttcagtcatctgcatggagccacaatgtgacttacacattttctttctttttcttttttagagcttgctctattgcccaggctggaatgtagtggtgcgatcatagctcactgcagccttgaattccctggctcaattgttcctcctgcttccatctcccaaagagctaggactataggtgccccgcaccatgcccagctgatttttatttttatctttgtagaaacagggtcttgctaagtcctccataggatggtctcaaactcctgggctcaagtgattctcccaccttggcctcccaaagtgccaggatcacaggagtgagccactgcccctggcctactttccacattttctagggctgaaggatttctagggacacaacattaaagttctgccatcgaagggtaaaaattagaaatctgtcttgacagctaagctctgggtgttagctgggttcctggagggtgggggcatgggaacagactttcctgaagacaactgtctcatgaaattaagtggtgtgacactcaaagggaacagcaatttgcacagctggatgcaaaccacaaacaaaagaagcaacaagcaacaagactgtacctgccaaatatgccagtggattctcctacaaggtccatgaggaaaaaaaaaacagccaggcccccgcctatggggacttgggtctccaaaggacaaacacaccaatgcaattccacactgtggaaacctgcaattcaacacttcccaatgtagtgtgcccagaacaccaagtacaacgtactggcatctgatgtggtagcaattctctctaaataagtttttaaaaagcaactcggtctgggaaccatagactaatagagatagaaaggatccagaaaggccatctacaccaacccccatttggagcagaaatctcttccagcttatgcccaacagttgatcaacatgactggtgactagttttcaagatagcccattccattttaggagagctttaaaaacaagctgaaatctgtcttctcatttcggactcctggagaaccactgaatgaatattacttttttttttttttttttttgagacagagtctggctctgtcgcccaggctggagtgcagtggcatgaagtcagctcactgcaacccccgcctcctgggttcacgccattctcctgcctcagtcttctgagtagctgggaatgcaggcacccgccaccacgcccggctaatttttttgtagttttagtagagacggggtttcaacgtgttgcaggatggtcttaatctcctgacctcatgatcctcccgcctcggctcccattgtgctgggattacaggtgtgagctactgcaccgcgcccagccgcaaatattactattttacagccatctgtgtgtatctcctctgccccattgtaaacttggccttgaatacaaagactctctgctcttctctgcatcctctaaactcagtgactgaggccggacatggtggctcacgcctgtaatcccagcactttgggaggccgaggcaggcggatcacgaggttaggagatcgagaccagcctagccaccattgtgaaacccatctctacaaaaatacaaaaattagttgggcatggtggcacgtgcctctaatcctatctgcttgggaggctgaggcaggagaatcgcttgaacccgggaggcggagttgcagtgagccgagatcgtgccattgcactccagcctgggcgacagagcaagactctgtctcaaaaaaaaaaaaaaaaaaaaagatttcaaacagttttcatgtttttctgttttgtttcctagtagacttccttttgagacataagataattgaccctgctgaatgacagggagaagggatttatgagtccttggccaagatagtcaggaagatcacaggaattgacagcaaggtgtcatgaggctatggttccaagtggggaaaagaacggtgagtctggggcaggcaggtaaagtcacgggagaggaggttcagggtaatatgactgcttctcctgtcctgccacagagaccactctgtgctagaagccactctccaacttgacaaagatactttagacaacagttcctttggttttattgttcaaccaagcacaaatcatccatttaagcatttagtccatcatcccctaccttgtccacaaggacatcaaaaatatcaaatatcttttgcaatgaagagccacaatattagtgaacttccactattggactggtaattctacccaaaaagaaacggacttgggcacgtgtcttgcataccactaaccaaccttggtcatgatccctgttttctccccagcttgttctcaaagatctggcctaataacttttccaagaattcatgctaactctgtggtttccagaatccactgggtttttttcctacttgaaaactaagacatttatctgtctcaactcttcggtcacctctcttattctccatgaatttcccggttattggataaggaggcagttatttcatgtgtttgctaaattggtcagaatatggattgactctttttaatttaaaacagagccatgaactcaaatattcctataggggccaagtaagacaagtaaaatgaaggcgaccctaaagaatgagacgatattgaactcacagggacggctaccctggccacatcaccctctgaccaacagaggcagccacgactcagctctcccagccaataactgtaaacaatgtgaacccagcattgctatacttttccattctcaaagaaaagtaggaaatctggacttttttgagagcacctgagttataagttcttgcgaataattgaaattttaaagaatcactgtcgggtcaaataaaacacacactctagatggcaccactgcactctagcctgggtgacaagagtaagactctgtctgtaaaaaatatatatatttttaatatacatatatgttatatataatatattcataaatgtataataaaatatatgttgaatatataaatatatacagaatatatacttatacataaatatatatatttttcaatccttagaaccctaggagtcattcattaagttccatcaccttacacaaatgacaacttcctccctggcctcagcttcatgtaaaatgaaaattacagcacttcccgcatcagactgatgcaataggtcaggtaagtaaatcacagtgcttggtatgcactcaataagtgttaaactgttgcttatgtagtattatccccattttacagcaaagaatactgaggtttaaggagacattgcgttatttgcccacagtcagatggcaagtggcagagctagagtttgagtccaggtcagtgcttttcttccttccaaatgagctggataatcctggtggtattaaccccaccctacaggttcacttttatcatcatgagacttgaacgactcccagctcttttctccagcgggatgaatgaaattaggcatgctgaaggttttaaaggtgaactggggtagagggaaaggactagggtagaggagagttgggggagtggggaaggacaggtttgaaacattcccactttagccttcttcagcttctacttggaggcacaacatgtagttttgcataaagcagtggtcccccatgtttttggcaccagggaccagttttctggaaggtcatttttccacagaccaggggtggggtggaggtgggggtggttttgggatgaaattgttccacctcagatcgtcaggcattagttagattcttataaggagagtgcaacctagatccctcacatgtgtagttcacaatagggttcatgctgccatgagaatctaatgtcgccactgatctgacagaaggtggagctcaggcagtaattcgagggatggtgtggctataaatacagatcaagctttgctacctcgcctgccgctcacctcctgctgcaaggaccaattcctaactggccacagaccactaccggtccatggcccgggggttgggggcctttggtataaagaaagcacaaggctaactgatggaaatggctgcttatgtgcaacagagcatgaagtttaccctccaccaaaaaaaaaatatatatatttatttctattgaactgggaaaataagcagaagcagttatcagcagagcatgcactttggcgcttcacttctggcagtggcctggactgtacattttgctaaacagctttaagatgcataaaaatgtatcctgagaaaatttgcttttcctagacagctttaaaatgcataaacacggccgggtgcagtggctcatgctggtaatcccagcactttgggaggccgaggtgggcggatcacctgaggtcaggagttcgagaccagcctggccaacatggtgaaaccccatctctaccaaaaatacaaaaattagccgggtggggtggtgggcgcctgtaatcccagctacttgggaggctgagtcgagagaatcgcttgaatccgggaggcagagtttgcagtgagccaagatcgtaccactgcactccagcctcagcgacagagcgagactctgtctcaaaaacaaaaacaaaaacaaacaaaaaatgcatacacactttccttagaaagtttgcaaaaagagaaaaatgtccctcatataacacaaattgtgagccctcttcccgctaaaaacacgtacattgagatttggctcaggaaaaacaaaaaaacaaaaaaacaaaaaacaaaacacttaacattgcaagagtggcttctttagaaatgattaactttgatattccacaggcacatgaagattaataaaaaggaattgaggttttacagatgaggaaaaccagagccgccctggaatcccttatcaacagaagaagtaaaagagagaaaagaaaaagagcctttggaaggcaattagcattcatatgaatattcaaaaagggggaatttcggcctgtcatttctctctcccacctctagttattggccaggcaggcatccccccatcttcacctccgtcttctcccctctgcagagttaatcagattgaagggaagcacctggggacattcaaactcttgtgtctctaaaacatggaatttacccatcaacccctcttctctccccaccctcgatactcagggctcatacgtgagatgctgaaatgcctgattcttttcagtgttgacaataaaccccgctgcaagccttgagaaccatcacccccttgtttaaggatctatgctaagaaactatgcttccttaaagtttaaacacaagagaagaggctgaacacagtgccactcatcaattacatttacctaaaaaagaaagaaagaaaaaggaaaaaagaaaataaaaaaagaaacccaaatcgaatcaagcctctaggaaatacaggggaggccaggcgcggtggatcatgcctgtaatcccagcactacgggaggctgaggcaggcggatcatttgaggtcaggagcttgaggccagcctggctaacatggtgaaaactcatctctactaaaaatacaaaaattagctgggcatggtggcatttgcctgtaatcccagctactcgggaggctaaggcaggggaatcgcttgaaccagggagtcggaagttgcagtgagccgagatcgcatcagcctggctacagagtgaaactccatctcagaaaaaaaaaaaaaaaaatgctgggcgcagtggctcacgcctgtaatcccagcactttgggaggctgaggcaggcagatcccttgaggtcaggagatcaggaccatcctggctaacatggtgaaaccccgtctctactaaaaaatacaaaacattagccgggtgtcgtggcgggcacctgtagtcccagctacttgggaggctgaagcaggagaatcacttgaacccaggaggtggaggttgcggtgagccaagattgggccatttcactccagcctgggcaacagaaggagactacgtcttaaaaaaaaaaaaaaaaaaaaaaaaaaaaagaaagaaagaaaaaagaaaagaaggaaggcagaggaagggagggaaagaatgagagagagagaggaagaaagagaaagaacagaaaaaaagaaacacaggggagagaggaccaagtttaaaagactgtaagataaaacaatctgccaaatccagactgtgggatattctaccagaaaactgacctgctatttccaataaaccaatagtctgagaagaaaagggaggagggggctgttataatataagctagacttaggagaggacaactaccaaataaaacaaaatacaacaaaacaataaacctccgtgtaaatactgtactctgtacttactgtgtactcgtatgaaccacagattgctggacttgaattaatcagccctaagagacttagggtcaaaagatccaggagtattccctaggaattctcagtggttatgccacagtgcttaggtttaacactttactcaatgaatatccaatttccctgtagccacagtaaagtaatttcagaagtcactttcatatgcacttatcagatcttatttggggaatgaatagatactggattatccacattcagagctgctggcaacctggcacagatgcccctagatcaacataaatattattttattatttgcttgagtgtgacatgctccatctctttattttaaaaagtaaaatttaaaaaataccagaaataattaaatattttaaaatgcttgggatgggaaaagtctaagcatgatcgaaaagtcaaaaacttgaaactgtaagacaaaaacttactatttttaccataaaataaaaatatctgacagaaaaaaaccattaacagaattaaaatacaaaccagagaaaatattttcattacatatgacaagcaaaataactcttataaagaaagcactttttctttattattattatttttagagagatggtctctgttgcccaggctggagtgcagtggcatcatcatagctcactgcagcctcaaactcctgggcccaagcactcctcccacctcagcctcccaagtagctgggactataggcatgccaatatgcccagctaattttttaatttttttgttttctatagagatgagatcttgctatattgaccaggctggtcttgaattcctgcctcagctttccaaagtgctgagattacaagcatgagccaccgagcctggcagaaagaactcttataaattaatattgttactagatgatctatcccagcttctggctaaagccagccccaccaacttatctatggagccccttctctcccacctccttcaaggacactgttccagtgattctgtcccctcccattgaccatttttttcctcctctttttttccttttctttttttatttttgtattttttgagacagagtcttgttctgttgcccacactggagtgcagtggcacgatctcggctcactgcaacctccgcctcctgggttcaagcaattaattctcttgcctcagcctcccgagcagctgggattacaggtgtgtgcaactatgctcagctaatttttgtatttctgtagagaacagggtttcgccacgttggccaggctggtctcaaactcctgacctcaagtgatccacctgcctcggcctcccaaagtgctgggattacaggtgtgagccaccatgcctgccccattttttcctcctcttgatcattctcatcagcaaacaaacatacagatacttctatctaaagataaataactaaataaaagcagaacaatttaaaacaaaaccactccttctcccgaccttctttccccagccagctagaaccccatttttttgctcccttttgcagcagaactccatgaaagcatgatctttacctcctctccttgtctcttaaatccatctgtttcaggcttttgtctcttccgtctaatatatttagaggtaactgcaattaatagtctgataaatgtttccagaattttttctctgaagatataaatacacctcaaaatgtttttttaaacagttatctctgggtggtgagacaacagattaattttcttttcctctttataatgttttggtcccgtctgaattttttaaaaaatgataagcctgtgtgacttttataatcaaggagaaaataactgttttcattttagataaagtcgccatctaggcatacagaactacatctgttgttttaaaaatgaagagttagaaataaagctagaataaataaacttgttcgcttttaatagaaaaactcctactaaaatatgcagtagctccttgtttcagagaaacacttttctggataactttttattagtgtagcttccagatcaatgttcttctacctagaggttatgatcttttcttgggcagatgacaggcagaaggataaatggtgagtagagggtctcagaagagatcagggataggagaagtccaaatactgctttggatcattaaggtatcttccactcatctgatgtaacctctccctctccaatacacacacacacacacacacacacacttttatcaatcctcattaacctcacttcacctccctgtgctacaatcactgtttctcatttccaacttggccccttctccatcccaacctttctttcctatctttcctattcagctcctttcttctccagatctaaacaaacctagcatttttcctcacctccacaagatgaaaataattccttgctttaaaataaaatagttagaatcatggtatggaggtaagtctgcagagcccataaatattttttaagaggctgagaatattttcaagaagtcaaagctatcatgacaacttcgtgatggcctataaatatgcatttgctgaattgaatctcacctgaagccaatcatttttgtaagaaagaaaatgacacaaatgtacatgcatggacaggaaagggtctaaaattttgtgcaacatcattatcatcatagtttcatctaggcttttggggggagttttaatttccttctctgcgtagttgtattttctaactgttctataatttatacacattacttacataataaaaaaattcaatacattcatcaaatgcatgtccaaaaataaaaggatagaaaaggccaacagccagggaggagaaagaagaagcagaaaagtgagaagcaaaggaaagaagcttccgaatcagtccacactaagtgagagggacacagagctaagtcacgagtctccatctttatcaaaccctggagtcccattcttcgttctggttggcagggttaacagacctcaggccaagtccaatgcaaggcaataataaagaaaaaaaactctttaaatggcattaaatgaaactttaaacggtggaaaattaataacttgttgctgggggtggagatggagtaggctcggcaatgctgatattcacagaactgaggctccccaccttcactttgcatctcaggctccgggagccacttaaaagcaagctatctatttccaagaagtaaatctcttggacggataccttatgttcacgagcccgcgagggaaggtgctgggctgtgtattggagctcccagccagagaagacagctatctcttttggcacaggttctcagggatgagaccatgtctagcggggattttctccagattcgacagccttggccctaccaaaacgcacagctttgttttcaccacacatcactcattgttgagtcttttttgtttttcctctcaagcatccacaggttgaatactgtgtgttcccaacagcctgtgaacttcttggaccagcaaagggacattcattttgctgagcactcctttcacatttctattgtgttcgatttcccactccccctacccgagtccccagagaataacttcttccttgttttaataacttggatcacagtcaaggttgatgtgtttctccattttgcaggatattttcttcagaagagacaaaacagaggccaacagggtaggagaggcttgttcggaaatcagcagccattgagaacacacagaaaatgttttcaaagaaatagaaagcagataacacaaggcaccatcaatagaaggcttcaaaatggtggactcatactcagaaagattccccagcaacgttttctcccagggacccactttaaaaatctaatttcatttgtttgggggtgagggagaagaaagtactttccgtaaagtaccttctcactgacttaaattgaaatacattctcccattggaggtcataaaagtagctgtgatcccagtgggtatgcagaaattagaaaatgagtaaagggagaaggaggagaaaggagcggttcagtcacacaagtatatcccacctctaacacagcaagttttcatttcatctgcccatgttctttataaaatcctatccccacccattgtaacactgctccctgacatctaatgaaagatgtctccgtggacttgcttgggatacaaggaaacaaacctattctttgtgaagccacttttttgaaacgaaacattttcaaggaaagaagacccgaaccagcatttagtggggtttagtctgaggtgcatgatcttttaataaaaaattgataatgcctcttttttatgagtgatatggaaattacatctttcttctctaaaacatgaaccaaatcaccagtttttcctgtaatagatcaaccttgtcacatgatttttcttaacattgatttcaaacagtgtcaagacactagttatgaatgaacacaaaaagttatgtgtctgaatttgtcttcatggaataccttttctcaaatgtattctccatattaatacttttcataccatggcaaaagaaagtaaatccagtatcacaaagaacaatgaccccaacccagattggtctcccctggggaaaggccaaactttctactggaattacagattcaactaaatccagttctgggctgttcatgagtttggaggagacagccaaggtgtcaccatgtttgaatgctaaaagtgaggcaaactgtgggtcatgacacatcagtgggttgtaaaatcaatctagtacatcacaatcagcattttaaaaaatgaaataggatagagagaaaaagtcagcatgcagagcatgtcataagagtattgctcagtgaaaatctatgttgtgtgtgtgtatgtgtgtgcacatgtgtgtatatgggatctcactgtaaagggtatttctaactgtggtcacagtctaaaaggtttccacccatttaagaagctctaatctagggcccaggtcctggagtcagacagaactgattccaacatggctctgccactcacttactatgtgaccttggttagatagcttaatctctccacctcctcagctaaaaaattggatgtggccatagtgtcctgggggtgttgtaagatcagatcagaagaggaaacatgtacagcccctcacacggcacccaatactgtttatatacatccttagataaatgtccagttcacaaaatggaagcggaaattcgtggatttacagtatgttctacagtgtgagagaagatggtaggcaattagctaattgtaatttttgctctgcaaaacagttgttcttttgtggaactatctgttgggccatctagccctttttataacagctccctgaataaagttaatattcgagaaatatacatatatattgtgtttgtttgttttgttttgttttgtggaagggtctcactctatcgcccaggctggaatgcagtggcctgatcttggctcactgcaacctccgcctcccaagctcaagcaatccgcccacctcagcattccaagtagctggggttacaggcatgtgccaccacgtctggctaatttttttgtattttttgtagagaaaggttttcaccacattgtccaagctgatctcaaactcctgagctcaagtgatccacccacctcagcctcccaaagtgctgggattataggcgtgagccaccatgccaggccaagaaatacatttttagtcagggcgcagcagctcatacctgtaatctcagcactttgggaggccaagtgtggcggatcgcctgaggtcaggtgttcaagaccagcctggccaacatggcgaaaacctgtctctaccaaaaatacaaaaattaaccaggtatggtggcagatgcctgtaatcccagctactcaggaggctgaggcaggagaatcacttgaacccaggaggcagaggttccagtgagccaagatcgtgccactgcactccagcctgggtgacagagtgggactccatatcaaaaaaaaaaaaaaaaagaaatacatttttatttcagaaatcctttctaagatgtaagtaacggaccaatgaaaactcttctcatttttttcttatgtaggattgaacagaacaaattgttcacactttgtgcttcatccttataatacagcttctgcctcctcagcaagtgactaacagtacatgtctaaagaccttaaaaagtatcgaaattatcttaaccatggaaatatccagctgcaaatacatgccaaattccttatctgtaatttttgtaactgaacaaacaagcccctgtattacagcatgaagaagtttttgaaactgaaatgtactgctcacttcacaatcatgttctgtctatccttgctatttagcttggggaaggttatcaagttctgaggagaggagaaaggagaaaaggaagggagccagaaagaaagggtgggaccaagaagccaaggaacttaagacgagttaagaacaggtagaaaggccaggcacggtggctcacgcctgtaatcccagcacttcgggagatcaaggtgggcggatcacctgaggtcgggagtttgacaccagactgaccaacatggagaaaccccatctctactaaaaatacaaaattagccgggcgtggtggcacatgcctgtaatcccagctactggggaggctgaggcaggagaatcgcttgaacccgggaggtggaggttgcggtgagcgagatggcaccattgcactccagcctgggcgacaagagctaaactccgtctcaaaaagaaaagagaatgggtagaaagacagaatgctaaaactgtcagcagtcccccagatggaagacaggagagaaataatttaaaacaacagaaagccttttctttgtggtccagagagaggaagaggagatctggataaaactgctgaaaaatttgggggcgggggtgaggtgaagaacctaacagtaagtcttggaagatgaaatacaactctgttgattactgaaggatgaaccaaataacaggactgggcccacacaataaagaagaaaagagggcggctggttgtggagttaaagcagagagaagaaaaagaaacagctacagaaattccccaaggtgcagggtacagggctggggaaggtgcgaatgtttgggaataaaaacaaactttgaaaaacaacaaaaaacaagtcttttcaaagcctggcctcagacttagggtaagttctccctgagagatttaaaggtaaataaagaagaagcaagttaagactgaaagctttgactgatctaacaggaacatgtggcattatggttgtaatgccacaaatttagtatttagtattttgtgaagtattcacaaagaaatgaacaggatgctgcataattttttacattgttttccaggggcatgttgatgagaaatgctactccctccattttgtccccagcatgtgtatgatgaataagaagaggtgggggcgggggagagagattcttcccatccaccaaatgctaccctgattacccacgtcagtcctaactcctgcattgccccaggtgccagtcagcaaggcctacgccatttgctttgccatctccgcattgtccactcacttgctctgcccttctgtccatttcactgagctggagctcccagcagcaactctagaaaagaagaagaggtggggagtggggaatggagcatgcatggatctggcaagccccccagatcccagaatccagtgaaaagcccctcaatacacagagacatcaagctagctatcaagagtgctgaactaagtccccagtcccactggggccaatggtggggtggaaggcaccaccggaggctgcaaagagcttgggctttggaatcagatctggacttggcatcccagctctagcacttagtaggatgtgaacctgggaagtaacttaaccctctgagcttggtttacttatctgtaaaccaagcagtacttagctctcatgagagtgttgggaagataagatgaggtaacctggaaggacacctgacacgctgcaggcacttcatgagtgttctatgctactgcccatctcttcacacttggtagaaaatgaaaagtgagctctttcaatggtgaaagcaagtcccacctgccttcttttttttattttttcatttttaggtgcaaagagtagctccttctgatgtttcctggctgtattctccctattatggttgtattatcaagtatggaaagaaaaaccctgttggtgcaatcaggtatgggcgtatctgactgtgaattgcccagatcagcatcacacaaatacaaatttggatcccggactttgcacacccaaagcacttcttgataagatagtggaatggttaacaactgtgatatcatagtaaaacacaattattaaatgaggttgaatagcctttgaagaattataaaacattcaacaagaccataataagtgtcctcaatattccttgttccagatagaaacaacccacatttatgtttttgaaaatttaatactgaacacaactcaccaactaggggaaggaggaaagcgttctaatgtcacagagagctttgccctttcttctaaaactgtactttcttcataagttctaagcacctttgaaatggttcaaacaggtataagttactgtggaaaggcaatggaatagagaaaaccttacccctttaaggtggctcctaagttcatctgattccaggtcatgcattcaagctgggatgtcatttggtataaattgtcactgttagaaaaacatctagagttagaaacacataaccacaaaataatacacaactgtttcttcaaaagcaatggagttttaacttttcttgaaagtgcaagcctccacattttccagaatgacagaatatgcaaatctgaattattttcatttcatcccactgatctctgcacagttatacacttcatacacagcagaagggatgtgagagtaactcagaagcattttttaaaacctttgtatagcaactattgaagtttctaaagaagtattaaacctttgaggggaaaaggctaaggggagtgaaactttgaaaggcaacacaggctggataactcaacattaaagttaaaagcctggagctgaaagtaaagacagcagattaattattcgtgaaaaggccattaagttgttttaatcaaaaggataagtatcatgtggattatgagggtctgaaaagtcagagtgatgggtgataaatggtctaaaaagcaaggatgtgacaagcagaagaaagacgatgataaactctatgcacagcggaaggaatcattttctatatgttttataatcctggtacaagtcaaattaaaaaaaaaaaaaaagagcccagttctataagactctatgagggaaatggcttatcatttacattaagactccaaagaagtcttacaccgctatgtaaaccaacaaaaagctgttctgtcccctctgtatttatctcattcctagaaaattagcacatgaatcaattgccagaaatctcctaaattaccaagctccatcaggaataaatttatgcctgaactgaaatggttaattatgaaatttgagacccaagagaccaagagtttttctgggacctcttggtctaaacactttacagaagaaaaatttcactctaccttcatggcagaaatgaaaaaagataagaggcatttaatatccgatgtgtggtatcagattgcagatataggaccatctctgtctggtcatggcattcttttaagctgcttcactgggcagaggcaacaccaaattttaattcagaaaggcttttttcaggccaagcataactgggaacttgaggaggggagagggaaattacagcaactcagaataaatgaattctgtgctctctgtccgcatagcgtgataaatcatggcagagtccatctgactctcatataataactctgaaaattatttggaactccttagtggtgggtacacaggataaggaggaaatcagattccaggagggaattttgcatatgaaaagtgaagtgacttcaaactcaaagtatgtgccgtttcattagtcagtgtgtatctggacgccgtcactcatccccgtgtctgactggctattatgctactacaatatcctacatatcaatgaaaaaaaatgatgagtttctcctgcagcttccctgtttgtagcagcagcccgtactggtctgtgccacaacattttgcaattccacaaattcttgctgtaaggctggagtaattaattcctgaaggaccccaacttttattagaagtgccagcctgcagcatttaccacaggagagtttcttgaactttctttgggctgacagttcattaataagcggcctcctccacaatctctctactggtttttgttctcctgcgccttttcatcaagcaatccatttattaatcttaccattaatctcagccaacaggcattgtattccccaggcagctctatatttttgtcactaattttttaaaaattgttcaccaactaaaatcactcagccccagttgacaattttcctaggccctttggggatatgggatctttctgaaattatttcatcctttcacaactcagaaaatcataattttcaagagaactgggaaagaaagatgagtgacagacgctgatgcagaagggtgaatgaatcccaaatatctaactttatgagttggaaattttctcacagacttaaagaatagtctggttgattcctaaggtctctgtaaggaagtaccccaaagagaaaataaacatttttttccgttagacggagtctcactctgtcgcccaggttagagtgcagtggcgctatttcagttcgctgcaacctcagtctcccatgcgcaagcaattctcctgcctcagccacccaagtagctgggactacaggcatctgccaccatgcccggctaatttttgtatttttagtagacatggggtttcaccatgttggtcaggctggtctcaaactcctaacctcaggtgatccacccgcctcagcctcccaaagtgctgagattacaggcatgagccaccgtgcctggccaatatttttaatggcattttcttggccctcagaaggcaaatcttctcaaatacaaggtctatgtcttacgtatatgactttttctagtgtgtactgtactgtctaatatggtatacactggccacatgtgactcatgccacacattaaaatgataagattttttgctatattgagtcaaatatgctatttgaaaaattaattccacagcttcttattttttgaatgtggttactagcaaatttcaaattacatgtatggcttgtgttatgtttctattggacagtgatgttctataagttttgggacattgagcaaatcagttcagctccctgcccctcagttttctcatctgttcaatgggaatattaatctccatcagtctaactgtacagaaatgttgtgaggcccataaaaggtaatgccctcaatggccctttgaagatgatacagataatatactttaattactttaatttgttctaacctaccaaattttgcacagcactttcacacattctcaatactgctcacaactttgtgaggcagatgtaattctgagtccccatttattagatgagggttgaggcacagagagatgcccagtgctggcatgcctgagcccccaccctcactctgccctgcccctatgaaggcatcctgagcctcatcctctcattaccatttatataataataataataacaataatacagacaagagtctggaggtgaaagagaatatgctcaagggagcatcatgacctactcagtctctagaaaatgacgatgctgcaagatgccccatgtgtcctcttcagctcactaagggcagagtgccaagatcccaatagaagccccctttgccattctagctgtcctgatagcttagcctgcaaactctcagaagaggagagaaggtggggaggatgtatgggacagaaggactttcagaaaatccccaagctactaataggtttcctgaggccagagataggatcagagcacagttttaaccacatcctgccttttgctggctggggctcctcagctgctcagtcagtgggcctggctggcacggcctttcaaatggaagtcaatgacagcaatgacaataacggctgctggggaggggacaaaaatgtgaactggagctaaaaatactgggccgaagcatgctcaggctctgatctctttgggcaatcgctcaacacccagctctcatcatggaagcccatggaaagaggcagcttcgttcaaggaatatagagcctctggcaaatgaagcatctaattactcaataaccactgtaggtgccaccacctcattcccagaggagatcagataagcaggtggtttggcttacagcgaccactgtggtcacgtaggcatttcagctccaaccgtctaactctgcctgttcggaagtgaactttcaaattgcaggctgccaaaatgtattccaaaagtcatggtgtcctttatattttttaagtagattttttttaaagtcacttgtttcctatgtaagaatgtttgaagttggaggcaaaggaaagaggaaagaaacttctataactgggattaatgcaagttggagtaaaataaaaggaagtcagtcctagcaaaaagggggagcttaaaaggaaatcagtagtagatcatatagagtttgttttggcctgaactgcagtattattaagttctcgacctctgcacaaaaagaaaggaagaaaaaaagcctcagctgttatctagatgagaactcctccactcttcaaacgcatgtgtgattcaagcacattttcatctttaagtctgtttattatattcagcagaataatttgtgtcatcaagggaatagaaccatctaacctggctgagatcagggtcacctctgccacgtagctgctggctggccaggtaacatcttggaagaagtaaagagctgcccccagaggataaaaaataaaaaggctcaaagtagacataactggcatctgtgattagaattcatgtttccagctttttcggtaatagctgtgtcccacaccaacagaaaggcctctgtgggtgtacctctacctaataacttaacagagggtgcagccagacttccacacacccttttcctgtgctcctccctttgaggtgctttgcagcctgcctgcctagaaatttctgcccagcaggccataatgaataattatttcacagtcactctcttggtattgtaatttctctcaagctcaccagctaaccaaagaaaaacccactggggattccatttctattaataaacacttggtcagcacaaaagttacaggaatatttggaactagatttttcctcctccctggagacgagtttaattcaagcctgtggctttgataacattgcccatcaccctggaagccgtttcagaccttccaccttctgcctatcattgcaggaaacaaatattgattttctactaagggaaaaggcagtgtacaatgtacataggtacacaagtgaaaagaggcattattaattacaattttattttcttgggcatgggctgtcatctgatttctgtctatgttgaaggccaacccaagtggtagatcggcacttcccactgagttatggaacccaagatttcccagaaactctatggctgctgaggaagtttctctcatatgaaaaataatctacttgtaacaggctccactgtcaatgtcaccatttgtgaatcatcacatccagttcaaaacagactaacattgaatgattgcttccagagtcggagtggtttcacctgctaacaggcaaaagtacagcaaaaggaaatatcttcatttaaattcgtagcacagttgctaaagaagaatatgcaaacctaataaaagagcaaaaggaaagggaaagggctagaatgcctaaaagaaacaatcagtgtgcatgggaatatttttcaaacgcagtgcacagaacttttcaaagtagccatgaggatcatatgtgaagtcggtatagtcaaggactggggtctccgaggaagtcagcaaaaagatgaggcaaagggactctgggaaggaaagacagcagaaaaggcccagctagctgccttttctaggtagaaattaggggggaaattgtgcctagtaaggttggaccccactactccctacactgacagaagaacttttccctggtaccttccctctgggcaagcccaaaccagggtggtcctggaagcagtcattctttctgggtctggatggacagggagaaaggtctctgccctgcaattctttaggtgcctgggctgaacttcaccccaacagttcacacccagtggtaaagacaaaactggaggagtctggagtttgaaagacaactgctctgtgtgttagaacttcaggagaatgctcaagcctgcttctgataatggccttcagggaaaacgctgtcccaaaccactaagaactttctgttgaaagctacaggtaaaactaatggataactgacttctttcacaactgtgggaaataggagaccatccttgagtgagactgaggacagatgccaccttcacaaagagaatggcacttatccatctagagagaaagcaagtgcagagggtaggaggatggattctggagctgtattgcctgaatttgaacaccacttccgtcccttaactgtgtcacactggggaaatttacttctcagggcctgagtttcctcctctgtaaaatggcagtgataacctgttgtgtccttcagagagtcactaggtagattaaataagtcaacacttgtaaagtgcttacagtggtacctggtgcatgttaagtctacataagcatgtgctcttatgatttatgagcaaaagtgatacattggcctggtgcggtggctcacgcctgtaattccagcactttgggaggcccaggcgggtggatcacaaggtcaggagtttgagaccatcctggctaacacggtgaaaccccctctctactaaaaatacaaaaaattagccaggcgtggtggcacatgcctgtagtcccagctacttgggaggctgaggcaggagaatctcttgaacccggcaggcagaggttgcagtgagccaagattgcaccattgcactccagccttgcaacagagcgagatgccatctcaaaaaaaaaaaaaaaaaaaagtgatacattgcctatacaaggggagtaatcagatagggaatcctgcgtggtctggtgtcactcagtgattcagagcacagctgggctgtgaagtcagagagactaaggatcaaatcctgattctgattctcacttgctgtgtgactttgagcaagttactttgagactctgaacttaaactagaaattatagtacctgcctcaacgagtagtcaaaagggttaaatgggtaaactgagtgaaccatttaacgtcatgcacagcaacatatagtcagcatgcaataaattccagttattacattataaggactcatgctgtcatccaacaatgatcactgggttccgtaagggcagacacctggtttcagaaaccctagtgacctttacacaaaactccacccaccttgtatatgagaggagagggtaaggaggatagagaaaaccacctcctgtcatttcccataagttgctgattgaatgtattttctattcactgttgttcatagccacaacaaatatatatgcagctgcaactcctcagaactgtcacctgagagaaaggagggaattgtgcaggggacaagggaagaactgggattttgagaatgtcctcaaagcacactccacactgtattttgcttatttaatgtcagatctgtaccattacctttctttagactgacaagggaaagtatatccaaagactgggaagaggcccagcacagcggctcacacctgtaatcccagcacttttcgaggccaaggtgggcagattacctgagatcaggagtttgagaccaacctggccaacatggtgaaaccccgtctctactaaaaatacaaaaattagctgggcatggtggccagcacctataatctcagctacttgggaggctgaggcacaagaatcacttgaatctgggagatggagttgcagtgagccaagattgtgccactgcactccagcctgggcgacagagtgagactgtctcgaaaagaaaaaaaaaaaaaaaaaaagactggggaagaaaaagtttggtgagggagggggagaaaaagctgggcagtcagcctcagagggtcaaatgcaacaaggcaaacaaaatacaagcaagctttccccagaaagtcccaaactttagagagaaaaaatgaatgaaaccagggaccagtagaagcaccactgaatacctaaaatccaaaagttagggtgttaagcaattaaagtttagtcctattttttatgcttcttcaaccattacattcacaaaagcatttaaataccctttcaaacttgtttaggagtaggaaagagggaaaccatataactgtagtaatgttggtgcacagacccaggtttaaaacattcctacacctgcccattcatctttagactgcaagggaagcacatgatctttgaaaactgaatggaaatgttaatttagagtgaatggagctttcaagatccagacagcacaaattccaagggaacaaactcttcctacaggggtcacaaattcttttttgagatgttactacttgggaaattttctgtgagagggaaaaatagtatttttattggatttgtgtaaaaataacaggaccaaagaaagttcctcaattataaagaaagaagatagaaataaacaaatacttctgaaaggtgaatttgatgaagtgcttaatacagtggccaatcagaagctggattagaaaacgtgaaaatttatgtgatgtttcctacttccctagcaaccacaaaatcagacctaagtcaaaatccaccataggcaccctggagaattgctattaaaccagtggtaatgatcgctttttcctggactcctctttcaaggctgccaggtcctctgatggaccccttcctagggtcccacagggtgagtctcggcttgggagagggaagtaacggatgtgtgtgtagcttcgagtcactgaggcaccagactgcaaggtcttccagtccccaacccccaagaacacctcccatatcgacagtgcccactcccgcatcaaggtcttctctcagcctagtgtgacacaccaactgagtccacagggagctaaggaggaaggggtggaccaaggtcattacgtgggaaccattccaacagcccgcctgatggctactagaataacagcaatgacaccctggcaatgggcaggagcagctacacaagaagaatggcaatggccccgctgccagttttgctagggaaggagattcacctcagagaataggtgcgaatcctgcccccattccaaagactttacccaccgaagggaggcgctgaggtggcaggcttggggcagcatgccgcgcctgtggtgcagaacaggaatgatttctagctagggacgcagaaaaagaaggatggggaggtgcgaccattggtgttcttgcccaccgcctgcctccacccgcccaaaaaaagtgtgatgaggaatccaagtttcgaatagataaaccggatgttccgggggaaaaaaaggaaaaaaaaaggtttctccagtccgcgcgcctcaggcgttagaaatagaaggggcgcatccctgcacctctctagaaactcccgggaaggagaaccttagatgcgagagccaggccagccccgggctcactctcgtaaaggcagcaagggcctggggctgcgcctcgctccggatcgaggactcccgcccctcctccacctgcgggactggacagtcccccaggcgcggccactcccccacccaatctcccagggcaggcgcttttccttccttcatgacctcactacctccttcccttgacgtcagccccgggtccccgcgcggaggggagggaggatggggatgggtttgggggcagccggtgtcaggatccccgagcaccagggaggagggggctatgaggtcatgcgcgcccaatcccgggccgcacaggcctcgcgctgctgctccccggcccccgccccaacttccagccccgtgcgggctggtgtgcgccgcagttactaggcaaccctatcgcagacgcgggcggccggccaagttcacccaaagttgaagaaaaaatttgggggagagaaggtggagcgagaggcgagaagaggaagcacggagcggggaaaagcttggaagggaatgaagctggccttgggcctcccgctcacaggaagaaggtcccacgcgggccagagcagcctccccgcagggccctgttgcgacccgatctccgtcctgcaccccggccgggggcccaccccagagcgtagcaggggcgctgggaacgacgtccacaaagcgctgccacgggtcgaaaccctggagggttgaggtggggagaaggctgtggccaaggctgtggccgaaggtacgcgccttcgaggtagtctggccggtgtggccattggatgggtttgaggtctcagaaccgagtgggagtggactccgtgtttaatatttagtcccgatgaaggtaaattcctcccagtaaagaccttctaaaaataataacttctcgagcgccgctccttcttcagctcgaaagagtaattgtcctcatttttatacaacataagaacaactcagagaccagggagatcagctttaatttcctctaagtagtagagtggagtcgaggcgtctcgtgcctccaagaccctgcatgcccgcagtcagggctgcccggctggggcgttcccaagtccgccggctcatgcgtcccctccggggtcccaaggacccagacgcagagcccagcgccttcctacctgctgtagggcgtcctcagcagcaaagcctggctgccggtgcagctgtcggtgggggtgtggcagccatagaccgggggcggcaccgagtactgctgctcacctgcagagagaaccgaagacagctgagcgagtgcgccccaagggctcggggtgcgaggctgcgggcaggggttgggggagacacgagatcctgagcctggggcactggggcctggatgagcggcgtgcagagcgaggccgtccagaatgcaagaagctaagcctctcactttgcattcccctagcagtcgctgcgctgtgcaccaaaaaggccctccggacattcatagacttagttggatggcgatgtccctaacgtacttgggatggagggagacccagtcttgtcctttaaatacagtgccattggggtaatgatttctaaggtccttttagatgtcctcctttgcctaatttgctgtgggttaggaattcctgggggagaggaggatagcacggaagaaggggagaaggactccacttggttccgctcgcttacccagcgagccctgctggcccatgggatcctcatgcttgaatgagtggttggggaactgcgccgcatggtgcgagggcgtgtgaccgtagctgggcgtcccgtcgaaggtgaccgtgctgtaacctgcgggagcggcggagagaagcacagtgtcagcggtgctctcgcaagacggggcagtgggtctgaaccagccacgggcggggggggtgtgcgctgaaccccgcattcggacccccagcggaggagaatccagccccacaagcctccaggactttcggcaggaagacggcccaagtccctggatgtgaccttgggacaggcttctccatccttttctgactaaaacccccacctcgctttttcccaatttatttatgccgcagtcttctacggtctctgccgcttctgcagcgaacccctggcaaattaagtataaaactcgttgcctgatcgacagagaaggttgttcaccccccaaaaataaactgcagctcttccgcaggagcagcgcgggcaagcgaaatgaatctgctgggctaaccccgcgttgactccgagctgtaaatcaggggcccgcgcaccaactttcattaattactcggagccagttaaatggcctggtcttaaaaatgggaagagtaattaccgagtaatgttatctgtctggggctacccgacctgacaccatgacacccaagggaaagctggtgagggggaaaacaagggccccttccagttgggccttcagatggcgaccctgcgctctcctcctcctcccccctatgggacccaccttgcgcccaggggtccgaccctgaccactgctgtaggagccaacttcctcactccccaggctggacaaccaatttcctttagagtgtgcctgacactgtatctccctttccctccatggtagtgcttcggtcctttgcctcagtttccccctagggaaatcctagcattcccccccccccccaaagtgagaaaaagagcgtggagcctcagttggaaaacatagtcttttataatttttgttattaaattgctttaaacttataccccacaagcttctggaaagctgttgctgcctctggggaaaaggatccttcggctaaagatacgtcattggccccggaacccaaggatggggtctcattcctctacaagttccggagtctgtggcctgaagtccagacacaatggctaaggagagctgctcctatgggatcctggcagggccaccccagcagcctcagatcctcctggcccaggactgccctgggtctccaaacttcacaaaattctcaggagtaaattgggtcaaacagcacccattctcccactcttgcactatttgaccaaagtgcctccaaagacttaagcaggactcagccgatgagcaggacccagggcatcgttacctccattttcgaaacacacacggacgctcatgcacacacaccaccaccccccgcccagaaaaaaaaaaaaagaaaaagaaaaaaaaaaagcttctctggggcaacagaggcatgagcctggagggtggtgtggcagagtgcaagggagggaaggagggggcaaatcctaactcccggatagtacaggtccaggcttaagtctcacacactgctcagcaccacacactggggatttgagaagccactagcttttatcatatgacctcgagggcctccatttctctcctgctaagtgggcaaagataacccccggccccgttagctctcctgcatgggcgagcacgtttgggcttccacagacttccttttgaaacctgaggcctggccttctttgaggcctatagatgagcttacaaacgaaatttggctcagggcacccactattgcccggagtgaaggccgaatttctgaaaggacactaaaaagagagagagagaaagagagacagacacagagagagagagagagagggagggagagagagagagagagagagagagagagagagagacgaaatagaagctacgaagaagttttctctagacgaacccttctccattcctgagcccaggagtaggcagggacccagggcactgcacaatcctcagagccctgctccgcaactgtccgtgcccggcgagggccgtgggtcccgagtcgcggcacccactctcgagacgtccgtccgcaccccagaactcgggcccaaggatgcccgtggcccgcgagccctcctaggcctcctcccagaccggacacgcagacctcggcgggcaaagaccggcctcaaaccctctccttcaggtccccccgggaggggcagtggtgaaagcgcctgcggagcggagggaggtctcttttaattagaagcttatcggacacgggtttgattagagcgcgctgtccctgggcccagcgcttggcctggcgcggagagtgcgggggcaggggccaggggaggtaaagctgccggctggaaggagcagcgtgttcaaaggctccttgtacaggccttggagggagagaatcgagtggccaaggtagcgcctttcccacggttagtcccggcccgggaggggagcgcaaccttgaccgtgcgctaagaggcgagacgcgctctgtgccctcctcccccgccggcggctgcagagaagccgggaaccgcctggcctggccgggccgtgagagctgaggggtgaaatggacagcaggctcagccaggaaggtgctcagaaggctgaaaacgatgactgcagctgcactgtgattggggaaaacctgtcccccaacaaaataccctctcctgtgtgaccggaagagggagcctttggccctcgggcgtcgcaggcctccgcacctgaccctagggtggcctgatgatcccaggcctaatcatgccttagggttctgcgagcctgcggggctgcgggatcagtggactagcaggcaacctcttttttttttttttttttccgagacggagtttcgctctgtcgcccaggctgcagtgcagtggcgcgatctcagctcacttcaacctcagcctcccgggttcaaacgattcttgtgcctcagcctcccgagtagctgggattataggcgcccgtcaccaagcccggccaatttttttttttgtattttcagtagagacagggtttcaccgtgttggccaggctggtctcaaactcctgacctcaggtgatccaaccgcctcgagccaccgcgtccggcccaagcaagcttttttcccctcctccttaagccttgcatctagtctggggctactcaagtcctcaccccacatctgccctcacaaacccgtcaacccccacacatggactaagagtttggtgcccctcccgcaggccagaagaaatccatctcaacggtggggccaagatccctggaaaaggagtagaaacaccctagcatggtctgggttcaaatcccacctctgccacctaatctcatagaacctggatttcctcatccaaaacaaggggcctctccaggattagctggtgagcttcttgcaaaggttctcgaggccattgtcttaattaatattcagaacccagtgcctgaccaagtaggcgattgatgtttgctaaattaatgtttacaagattaggatgcaagatataatatttaagaatttaaaatatgaacatgcttgtgaagttttgggcggttgtgagtgggtaccaacaattgcccctgcctgtgcaccatggctagactgccctagggatccagagacggccttgattcctctcccctggggtttggccttggcgctctgatggccatttccacatttttgagagttgatgcccttgcctctcacagcccaagtcttgggccaggccctgcattcctggggaagcagcaggaaccctggaaatccaaagaataaacccagaatctcgagggccacccttgcccactccaggatagcagccggagcgcttctcacatccaagctgcccaatgagcctcaagggctgggtaagatggacccatctgttttcactgcaagacaaaacttaaacctggagatggtgcttccaggctatatgacttgaatctagggccctctctccattgggctttttctccagggtggagaagaaggatacattcacctactagtcctggtccccttttaactttttctccatggcagccacgcctgtatattacagaagaatccagatattttccagaagtgtaatgcctgctggctgcaaaacccacagtcccaccccccacgacatgtgataagatcccaggcaccagacctgccctgaaaagggctggacaagggacccaaacgaagcgacagaacccaggtttcaaaaatcccctagaagtactaaaaagataatggcgtagtagtattttgtgccccaggggcatggattcgatggtttctcaaccgcctccaaatagcacacatgcagacagtgctctcggattcattgtttctcagtcacagatgtttagatgggttgccgagttccatatttaaagccccaagagggtggtgggtagcgcttctgcatctatggagtataacttcaagccggacccaatctccaggttgcccatctcagctgtcctcttatagacggggacactgagacctagaaactccccaaaagtaacaccagcctgctaaacaaaggtggcgcgatctgatcaaagaacacaagcctcagcgaccagtaagttgtcccaacgccccttgagtacaaaacactaatttcactaactaaaagcatagagtggaggcaacccttgggtctgcttgcggttcctccacaggacagtgatcccagattctcccgaagaaaagggcggtttcgatttctccaaggcttcgcgggggccgggtgctcctggttaggctaaggtaggagcggcctgaagacgcgcgtttagaaggcgcgggtgaaggcgggcaacaagggcagagcccttctcccgagccttgggcgaaggtacctcctgcaaaagatacactctgcttcccacgcattccaaaaacatcccggtccctaggccctcgagtaattttgctccaggaaaagcatccgccattgtattagtaaagcgtttactaaattaccgaatcaaaccgaactggcttaggttctcaatagcgtggaaatccactgaaaataaatgaagagggcaaactacaggggctccgcaggttcgggtccgcgccgcccaggcgaaagagaggtgggcgggcatcggcgcgggatgagaaaccaacctgatacttatcgtgtgccgagttccctccttgtatcctgactaagcacagcgaataaccctgtccttgttctaaccccaggtcttgaagaaatactgtcccagctgagccccgcgtttacaagatgaagaggcgccccagatgcgctgaaagaaaggccaaagctcgtgcctccttccactgcctgcggtagaacctggtcccgcatagcttggactcggataagtcaagttctcttccatccccagaacctgcgtggccgccgcctgagcgaagcccagtgaagatccacttctgtattaccatacgcgggagctatccacggacacgacgctgttccagaaagccatttagttactggaggtgcatgtgctcattctagttctctacgatacttaatgtgcacctaagtgtgtgccaacaccgtattataagggctggaggtgctcctggacattttagcgctgcggaggcagcacagcacaggcgctcacccccgcgctggtcccactccgaatccagagtccagacgtctgaaaagcgctacgcttggtgacaatttggcgtttccttaattaacaaaactctccccaaggcagagccagacactgcgccggtctcctggttccactcccgtggggactagcagtcccggaatctctcggactctaaggggccccagacgccctcccggctcttgcgaacagtcaggctcctagctctgcctggctttggaggatgtcgggggccagtgcctgcgtgcactcccactctccggcctcctccccagccgccgcttccgctatcctcacggcccttgggaagcagctgggtaagagctgcggtcaaaaggggtaggagaggggggtgtcctagagcggagagtccctggcgccactgccccgcgcgtagggggcgctccccggcctacttaccctgattgcgaatagcgggctggctctcgaggcagctgggcaggtagggcgcgttaggaaacatcctggcctggccggatgacgcctggctgggcggaggaggaccgaagggcccgtagcgacaggctccggctgtgccagtgaactggccggaaaagtggacagtgaaggcgctcaggcactgctcctcgtgcggctccgcgccgccccagctcggctcctgtttgatgaaggagtgaggcggcggcggcgggggtggcggcggagccggtggcggcgcggggccgcccaacgacccgtaagccgaagcgcccgggggcgcaaagtccagcaccggcgcccactgcgccgcgccgctcacaggcagggcacagccgccgccgccacccagggaggggacggcgggcagcagcgcgttcaggtcccgcacgtcggagcccatttgctgcggctcagacccggacgccccgcggctcctccggccctggagacgttcagcgctggcctcggcggcgcctaacttggcccagatgccgcccgggtcccggactccctgctgctctggctgctgtaggcacccaggcccggagcggagcgtgtgctgagacgccggctccgggacacacgtggaagccgggtcctgcagcaagaggaagtccaggatcgcggcgaggagacggcggggcccgggcgcctgggctgccgtcccggctctgggtgggtgggtgggtgaatgagtaggtgggagggagggcgggaagtgggggagcggacaggcggtcgggttgcggagagcccccgggtgtgggcgctgccttgaactccttaccccagctgcctggctgccctcagcttcccaaagctcaaataagaggggccggcggcgcggggaagaggaggagccaggaggctcggccgctccattcactcagcagcccaagcccggccaggcagcgcgcgctgctccttgggggcgccctcgcagctggggtgagggcgggtccgagggagcgtccctctcggagacaccctcctcttcaacccaacacgcgctctcagctggccggtgtggcacaaccctccccccacctccccttcttggccttcgccagtgtgggagcctcgtctcactggagagtccgttcaggtaagcagtgagtccgggcagggtcgaatgcggtgggagtagagatggggttgttaatctaaaagagtggtttggagggaggggcaggtaggctccaagagggcgggaacttcaggaaagcgcagaaagaactcagtcaagcttcaaagaagcgtatacccttgctttgcacccttgagtctggctcttgcttctagaactgtcgggtaggggagtggccatgatcttggggtcactggggaaagaggtggccctttgtgggttccagaggtcgggactgaaagcgaacgtccctcagttgggtggccgggagttgcaccagttataagccgggcgtatttcgatcggctagtagttgtttacttggtgaggtttgcgccaggcggaaggcggttgccgcctacctaaaattggagtcagcagcacttagtttccctttccagtgaggaatatctaattcttctacggttaagccgggaaaacagcggctagtttaggagggaagaaaacccttgggcaaacgcccaaagcctgcgtatattccggccggagcatcctggcgcccagtttggggaggaggggtgaaggggagggtttggatacgaagcccggcagggagcgggtaactcctggagccactccgccgagcactgcctgtggccctggtcgaggataccattctggttgctcagtgattgaccaggaggcggaagccagttaaggggaccaaggagtggagtagggagaacctccatcggcccacgggcgcgagttagtgttcgaatctttgggagctcgaagagcttcgctaaatctgactcccttcgtctagtctctgtttggcagcccccgcgccccagagcaggtgtttggggcgggtagggggtgttttggtttggtttttggatcttctaaaggagtcagtatctattgggaaacaacccctaggcaaggagaagaaccgggggccggagcggagcgtgtttcagaggtgcgtataaaatcccaggggcgccaggaggcagcagcgacggcgcagcgtgggacggccaggcgcgacgggagggaagcaaccggttgcagtccggcctcctgtacctggctggcccgggctggggctgcaagctttccagccaaacttatgtgaagcaaagtagttgcagtttgacaaagaatggcgtttcaataa
